(19) United States
(12) Patent Application Publication
(10) Pub. No.: US 2025/0381260 A1
(43) Pub. Date: Dec. 18, 2025

(54) FAP2-DERIVED ANTIBODIES AND VACCINES AGAINST FUSOBACTERIUM

(71) Applicant: PROVINCIAL HEALTH SERVICES AUTHORITY, Vancouver (CA)

(72) Inventors: Robert HOLT, North Vancouver (CA); James ROUND, Vancouver (CA); Cody DESPINS, Vancouver (CA); Scott BROWN, Langley (CA)

(21) Appl. No.: 19/130,321

(22) PCT Filed: Nov. 17, 2023
(86) PCT No.: PCT/CA2023/051551

§ 371 Date: May 15, 2025

Related U.S. Application Data
(60) Provisional application No. 63/384,320, filed on Nov. 18, 2022.

(51) Int. Cl. A61K 39/114; A61K 39/00; A61K 39/40; C07K 14/195

(52) U.S. Cl. CPC A61K 39/114; A61K 39/40; C07K 14/195; A61K 2039/53; A61K 2039/6018

(57) ABSTRACT

A new composition of matter composed of engineered sequences for the expression of Fap2-derived polypeptides that provoke immunogenic responses against Fusobacterium spp. is provided. Antibodies and vaccines produced using such sequences and methods of use are also provided.

### CROSS-REFERENCE TO RELATED APPLICATIONS

[0001] This application claims priority to, and the benefit of, U.S. provisional patent application No. 63/384,320 filed 18 Nov. 2022, the entirety of which is incorporated by reference herein.

### TECHNICAL FIELD

[0002] Some embodiments relate to antigenic targets for producing antibodies and/or vaccines active against Fusobacterium spp. Some embodiments relate to antibodies or vaccines that target such antigenic targets. Some embodiments relate to vectors or constructs for expressing such antigenic targets. Some embodiments relate to therapies, including antibodies or vaccines, useful for treating cancer or other disorders or health issues including ensuring maternal health, avoiding adverse pregnancy outcomes, treating gastrointestinal disorders and other infections.

### BACKGROUND

[0003] Fusobacterium nucleatum is an invasive (Han et al. 2000, Swidsinski et al. 2011), adherent (Weiss et al. 2000) and pro-inflammatory (Peyret-Lacombe et al. 2009, Krisanaprakornkit et al. 2000) anaerobic bacterium. It is common in dental plaque (Bolstad et al. 1996, Ximenez-Fyvie et al. 2000) and there is a well established association between F. nucleatum and periodontitis (Signal et al. 2011). Anecdotally, F. nucleatum has been implicated in cerebral abscesses (Kai et al. 2008) and pericarditis (Han et al. 2003) and it is one of the Fusobacterium species implicated in Lemierre's syndrome, a rare form of thrombophlebitis (Weeks et al. 2010). Various Fusobacteria, including F. nucleatum, have been implicated in acute appendicitis, where they have been found by immunohistochemistry (IHC) as epithelial and submucosal infiltrates that correlate positively with severity of disease (Swidsinski et al. 2011). When isolated from human intestinal biopsy material, F. nucleatum has been found to be more readily culturable from patients with gastrointestinal (GI) disease than healthy controls, and the strains grown from inflamed biopsy tissue appeared to exhibit a more invasive phenotype (Strauss et al. 2008, Strauss et al. 2011).

[0004] Recent literature reviews show that F. nucleatum has been implicated in or associated with many different types of cancer and/or more adverse prognosis in various cancers including colorectal cancer (CRC), oral squamous cell carcinoma, oral/head and neck cancer, head and neck squamous cell carcinoma, esophageal cancer, esophageal squamous cell carcinoma, human papillomavirus positive oropharyngeal squamous cell carcinoma, gastric cardia adenocarcinoma, gastric cancer, Helicobacter pylori-positive gastric cancer, pancreatic cancer, stomach cancer, breast cancer, bladder cancer, cervical cancer, laryngeal squamous cell carcinoma, and lung cancer (He et al., 2022). Cancers that are positive for Fusobacterium are much more likely to relapse, the presence of a high amount of F. nucleatum has been associated with poor patient outcomes (e.g. Serna et al., 2020), and Fusobacterium may promote chemoresistance by modulating autophagy (Yu et al., 2017).

[0005] High F. nucleatum tumor burden is associated with poor patient outcomes, chemoresistance, and increased metastasis. A key virulence factor of F. nucleatum is the protein Fap2, a type Va autotransporter that mediates tumor enrichment via binding of GalGalNAc, which is upregulated by many cancer types including colorectal cancer, and which also facilitates immune inhibition via binding of TIGIT (T cell immunoreceptor with Ig and ITIM domains), which is present on T cells and NK cells.

[0006] F. nucleatum has also been implicated in a number of disorders beyond cancer, including a number of adverse pregnancy outcomes (including chorioamnionitis, preterm birth, stillbirth, neonatal sepsis, preeclampsia), gastrointestinal disorders (including inflammatory bowel disease and appendicitis), cardiovascular disease, rheumatoid arthritis, infections of the head and neck (including respiratory tract infections including Lemierre's syndrome, acute and chronic mastoiditis, chronic otitis and sinusitis, tonsillitis, peritonsillar and retropharyngeal abcesses, postanginal cervical lymphadenitis, and periodontis), as well as infections in the brain, lungs, abdomen, pelvis, bones, joints and blood, and Alzheimer's disease (Han, 2015). Studies suggest that Fap2 is involved in mediating placental localization and enrichment of F. nucleatum, which is associated with adverse pregnancy outcomes such as preterm birth (Parhi et al., 2022).

[0007] Vaccine-induced immunity against F. nucleatum may thus reduce F. nucleatum tumor burden and thereby reduce the negative clinical outcomes associated with F. nucleatum-positive cancers such as CRC. In addition, vaccination against Fusobacterium ssp. could help prevent and treat indications that are associated with Fusobacterium ssp. invasion and/or infection. Including, but not limited to: pre-term birth and miscarriages, and more broadly adverse pregnancy outcomes; other cancers, non-exhaustively including oral, head and neck, pancreatic, biliary tract, breast, and melanoma; dental disease such as periodontitis; autoimmune diseases non-exhaustively including IBD (inflammatory bowel disease), atherosclerotic disease, rheumatoid arthritis; and direct infections non-exhaustively including appendicitis, sepsis, and tissue abscesses.

[0008] The foregoing examples of the related art and limitations related thereto are intended to be illustrative and not exclusive. Other limitations of the related art will become apparent to those of skill in the art upon a reading of the specification and a study of the drawings.

### SUMMARY

[0009] The following embodiments and aspects thereof are described and illustrated in conjunction with systems, tools and methods which are meant to be exemplary and illustrative, not limiting in scope. In various embodiments, one or more of the above-described problems have been reduced or eliminated, while other embodiments are directed to other improvements.

[0010] One aspect provides a target antigen, the target antigen being a Fap2 antigen having a Fap2 passenger domain from Fusobacterium spp. or an antigenic fragment thereof. The target antigen can have the sequence of the extracellular passenger domain of Fap2 or portions or fragments thereof. The target antigen can have the sequence of full length Fap2 or portions or fragments thereof, including between 8 and 3500 contiguous amino acid residues of the extracellular passenger domain of Fap 2. The target antigen can have a sequence according to any one of SEQ ID NOs: 1-5, 46-80, 97-112, 120-126 or 4560-4562 or fragments thereof. The target antigen can be a B-cell epitope having a sequence according to any one of SEQ ID NOs: 127-294 or T cell epitope having a sequence according to any one of SEQ ID NOs: 317-4577. The target antigen can have an N-terminal secretion signal having a sequence according to any one of SEQ ID NOs: 295-316. The target antigen can have a transmembrane domain or C-terminal multimerization domain.

[0011] One aspect provides isolated nucleic acid molecules encoding the target antigens described above and polypeptides having any of the sequences set forth above. The nucleic acid molecules can be DNA or mRNA. The nucleic acid molecules can have a sequence according to any one of SEQ ID NOs: 6-10, 11-45, 81-96, or 113-119.

[0012] One aspect provides a vaccine including the target antigens described above or the nucleic acid molecules described above. The vaccine can have a nucleotide construct encoding the target antigens as described above, the nucleotide construct can be DNA or mRNA. The vaccine can have an mRNA construct where the mRNA is formulated in a lipid nanoparticle. The vaccine can be a viral vector vaccine or a DNA plasmid vaccine.

[0013] One aspect provides an antibody targeting the target antigens as described above. One aspect provides an antibody produced using the target antigens as described above.

[0014] One aspect provides use of the target antigens, nucleic acid molecules, vaccines or antibodies described above to induce an immunological response against Fusobacterium spp. in a subject.

[0015] The target antigens described herein can be used in the prevention and treatment of cancers involving Fusobacterium spp. The target antigens described herein can be used to prevent and treat adverse pregnancy outcomes, dental disease and autoimmune disease involving Fusobacterium spp. The target antigens described herein can be used to prevent and treat conditions caused by or related to infection by Fusobacterium spp.

[0016] In addition to the exemplary aspects and embodiments described above, further aspects and embodiments will become apparent by reference to the drawings and by study of the following detailed descriptions.

### BRIEF DESCRIPTION OF THE DRAWINGS

[0017] Exemplary embodiments are illustrated in referenced figures of the drawings. It is intended that the embodiments and figures disclosed herein are to be considered illustrative rather than restrictive.

[0018] FIG. 1 shows the predicted structure of Fap2 and its associated domains.

[0019] FIG. 2 shows the expression of Fap2 antigens in eukaryotic cell culture using intracellular staining and flow cytometry.

[0020] FIG. 3 shows detection of Fap2-specific antibodies in plasma pools of Fap2 mRNA-LNP immunized mice.

[0021] FIG. 4 shows detection of Fap2-specific antibodies in plasma pools of Fap2 mRNA-LNP immunized mice for additional Fap2 antigen constructs.

[0022] FIG. 5 shows flow cytometry detection of surface FLAG expression in FLAG-tagged transmembrane displayed Fap2 truncation pDNA transfectants.

[0023] FIG. 6 shows flow cytometry detection of StrepTagII expression in Strep-tagged transmembrane displayed Fap2 truncation pDNA transfectants.

[0024] FIG. 7 shows reactivity of secreted and transmembrane displayed Fap2 truncation vaccine serum pools to Fap2-T3.

[0025] FIG. 8 shows the reactivity of B-cell hybridoma media samples to various Fap2 antigen sources.

[0026] FIG. 9 shows the per amino acid B-cell epitope probability scores as overlaid on the predicted structure of Fap2.

[0027] FIG. 10 shows plots of the per amino acid B-cell epitope probability scores for Fap2 in nine F. nucleatum subspecies.

### DESCRIPTION

[0028] Throughout the following description specific details are set forth in order to provide a more thorough understanding to persons skilled in the art. However, well known elements may not have been shown or described in detail to avoid unnecessarily obscuring the disclosure. Accordingly, the description and drawings are to be regarded in an illustrative, rather than a restrictive, sense.

[0029] As used herein, the term “cancer” or “neoplasm” refers to any unwanted growth of cells serving no physiological function. In general, a cell of a neoplasm has been released from its normal cell division control, i.e., a cell whose growth is not regulated by the ordinary biochemical and physical influences in the cellular environment. In most cases, a neoplastic cell proliferates to form a clone of cells that are either benign or malignant. Examples of cancers or neoplasms include, without limitation, transformed and immortalized cells, tumours, and carcinomas such as breast cell carcinomas and prostate carcinomas. The term cancer includes cell growths that are technically benign but which carry the risk of becoming malignant i.e. a “malignancy.” The term “malignancy” refers to an abnormal growth of any cell type or tissue. The term malignancy includes cell growths that are technically benign, but which carry the risk of becoming malignant. This term also includes any cancer, carcinoma, neoplasm, neoplasia, or tumor.

[0030] As used herein, the terms “gastrointestinal” or “GI” cancer or carcinoma refers to a malignancy or neoplasm of the gastrointestinal tract. GI cancers can include cancers of the upper GI tract such as, esophagus (e.g., squamous cell carcinoma, adenocarcinoma), or stomach (e.g., gastric carcinoma, signet ring cell carcinoma, gastric lymphoma) or of the lower GI tract such as, small intestine (e.g., duodenal cancer/adenocarcinoma), colon/rectum (e.g., colorectal polyps/Peutz-Jeghers syndrome, juvenile polyposis syndrome, familial adenomatous polyposis/Gardner's syndrome, Cronkhite-Canada syndrome, familial adenomatous polyposis, hereditary nonpolyposis colorectal cancer, etc.), anus (e.g., squamous cell carcinoma).

[0031] As used herein, the term “Fusobacterium” refers to a genus of gram-negative, anaerobic, rod-shaped bacteria found as normal flora in the mouth and large bowel and often in necrotic tissue (Miller-Keane Encyclopedia and Dictionary of Medicine, Nursing, and Allied Health, Seventh Edition. 2003 by Saunders, an imprint of Elsevier, Inc.). Some Fusobacterium species are pathogenic to humans (Mosby's Medical Dictionary, 8th edition. 2009, Elsevier). Fusobacterium species include F. gonidiaformans and F. mortiferum (occurring in respiratory, urogenital, and gastrointestinal infections); F. necrophorum (occurring in disseminated infections involving necrotic lesions, abscesses, and bacteremia), F. naviforme, F. russii, and F. varium (occurring in abscesses and other infections), F. fusiforme (found in cavities of humans and other animals, and sometimes associated with Vincent's angina), F. polymorphum, F. equinum, F. nodosus, F. nucleatum, etc. (Miller-Keane Encyclopedia and Dictionary of Medicine, Nursing, and Allied Health, Seventh Edition. © 2003 by Saunders, an imprint of Elsevier, Inc.; Mosby's Medical Dictionary, 8th edition. © 2009, Elsevier). In some embodiments, a Fusobacterium species includes a Fusobacterium sp. strain 3_1_36A2, Fusobacterium sp. strain 3_1_27, Fusobacterium sp. strain 7_1, Fusobacterium sp. strain 4_1_13, Fusobacterium sp. strain D11, Fusobacterium sp. strain 3_1_33, F. gonidiaformans ATCC 25563, Fusobacterium sp. strain 1_1_41FAA, etc.

[0032] As used herein, the term “Fusobacterium nucleatum” or “F. nucleatum” is meant as an invasive, adherent and pro-inflammatory anaerobic bacterium. In some embodiments, a F. nucleatum includes a F. nucleatum subsp. nucleatum ATCC 25586, F. nucleatum subsp. polymorphum ATCC 10953, Fusobacterium sp. strain 3_1_36A2, F. nucleatum CC53, Fusobacterium sp. strain 3_1_27, F. nucleatum subsp. vincentii ATCC 49256, F. nucleatum 7/1, Fusobacterium sp. strain 4_1_13, Fusobacterium sp. strain D11, F. nucleatum subsp. nucleatum ATCC 23726, Fusobacterium sp. strain 3_1_33, Fusobacterium sp. strain 1_1_41FAA, etc.

[0033] In some embodiments, the F. nucleatum subsp. nucleatum ATCC 25586 has a nucleic acid sequence substantially identical to one or more of the sequences referenced in GenBank Accession No. AE009951 or to NC_003454.1 or a fragment or variant thereof. In some embodiments, the F. nucleatum subsp. polymorphum ATCC 10953 has a nucleic acid sequence substantially identical to one or more of the sequences referenced in GenBank Accession No. NZ_CM000440, or a fragment or variant thereof. In some embodiments, the Fusobacterium sp. strain 3_1_36A2 has a nucleic acid sequence substantially identical to one or more of the sequences referenced in GenBank Accession Nos. ACPU01000001 to ACPU01000051, or GG698790-GG698801, or a fragment thereof. In some embodiments, the F. nucleatum 7/1 has a nucleic acid sequence substantially identical to the sequence referenced in GenBank Accession No. CP007062.1, or a fragment thereof. In some embodiments, the F. nucleatum ATCC 23726 has a nucleic acid sequence substantially identical to the sequence referenced in GenBank Accession No. NZ_CP028109.1, or a fragment thereof.

[0034] Given that Fap2 is a suspected virulence factor for Fusobacterium spp., the inventors hypothesized that generating anti-Fap2 immunity with a vaccine may induce Fap2-specific neutralizing antibodies, thereby targeting an immune response against Fusobacterium spp. and preventing tumor enrichment and immune inhibition, and evoke a CD8⁺ T cell response, targeting Fusobacterium spp. invaded host cells.

[0035] In some embodiments, the inventors have created new compositions of matter composed of engineered sequences, or constructs, for the expression of Fap2-derived polypeptides, or antigens, that provoke immunogenic responses against Fusobacterium spp. and are thus amenable to the design of a vaccine. In some embodiments, these constructs are cloned into vectors that allow for in vitro transcription of mRNA and the plasmid-borne production of the Fap2-derived antigens in eukaryotic cells. In some embodiments, these constructs include high homology regions that provide immunogenicity against different Fusobacterium species and subspecies. In some embodiments, the Fusobacterium spp. is F. nucleatum. In some embodiments, the F. nucleatum is F. nucleatum 7/1, F. nucleatum ATCC23726, F. nucleatum ChDC-F317, F. nucleatum Fn3-1-27, F. nucleatum Fn3-1-36A2, F. nucleatum Fn4-8, F. nucleatum Fn71, F. nucleatum KCOM-1322, F. nucleatum KCOM-2931, and/or F. nucleatum MGYG-HGUT-01347.

[0036] In one embodiment, a target antigen derived from Fap2 is provided. In some embodiments, the target antigen is a region of the extracellular passenger domain of Fap2. In some embodiments, the target antigen contains between 8 and 3500 contiguous amino acid residues of the extracellular passenger domain of Fap2 , including e.g. 9, 10, 11, 12, 13, 14, 15, 16, 17, 18, 19, 20, 21, 22, 23, 24, 25, 26, 27, 28, 29, 30, 40, 50, 75, 100, 200, 300, 400, 500, 600, 700, 800, 900, 1000, 1200, 1400, 1600, 1800, 2000, 2250, 2500, 2750, 3000 or 3250 contiguous amino acid residues of the extracellular passenger domain of Fap2. In some embodiments, any portion of the extracellular passenger domain of Fap2 that is at least 8 contiguous amino acids in length represents a potential epitope for cytolytic CD8+ T cells.

[0037] In some embodiments, the target antigen has an amino acid sequence having along its length between 90% and 100% sequence identity to the corresponding portion of the reference sequence of Fap2 from F. nucleatum 7/1 shown in SEQ ID NO:1, including any value therebetween e.g. 91%, 92%, 93%, 94%, 95%, 96%, 97%, 97.5%, 98%, 98.5%, 99%, 99.5% or 99.9%. While throughout this specification amino acid residues are described with reference to the corresponding position of the reference protein sequence of Fap2 from F. nucleatum 7/1, those skilled in the art will appreciate that Fap2 sequences may differ slightly between Fusobacterium spp. so that the specific positions of the amino acid residues in a different Fusobacterium species should be determined with reference to the amino acid residues that correspond to the positions identified herein for the Fap2 reference protein sequence from F. nucleatum 7/1.

[0038] In some embodiments, the target antigen has the amino acid sequence of one of constructs shown in Table 1:

TABLE 1
Sequence of tested Fap2 target antigens.

| | | | Corresponding | |
|---|---|---|---|---|
| | | | Amino Acid | |
| | | | Residues of | |
| Name of | Amino Acid | DNA | Fap2 from F. | |
| Construct, | Positions of | Sequence | nucleatum 7/1 | |
| Features of | Corresponding | Amino | (3799 aa in | Corresponding |
| Construct | Features | Acid Seq. | length) | Sequence |
| FL (full | 1-21: IGk signal | SEQ ID | 43-3495 | Amino acid |
| length) Fap2, | 22-3474: FL-Fap2 | NO: 6 | | residues 22-3474 |
| with Ig kappa | domain | SEQ ID | | of SEQ ID NO: 1 |
| signal | 3475-3484: | NO: 1 | | |
| peptide and | Strep-tag | | | |
| strep-tag | | | | |
| T1, with Ig | 1-21: IGk signal | SEQ ID | 43-371 | Amino acid |
| kappa signal | 22-350: T1-Fap2 | NO: 7 | | residues 22-350 |
| peptide and | domain | SEQ ID | | of SEQ ID NO: 2 |
| strep-tag | 354-363: | NO: 2 | | |
| | Strep-tag | | | |
| T2, with Ig | 1-21: IGk signal | SEQ ID | 43-1080 | Amino acid |
| kappa signal | 22-1059: T2-Fap2 | NO: 8 | | residues 22-1059 |
| peptide and | domain | SEQ ID | | of SEQ ID NO: 3 |
| strep-tag | 1063-1072: | NO: 3 | | |
| | Strep-tag | | | |
| T3, with Ig | 1-21: IGk signal | SEQ ID | 43-1627 | Amino acid |
| kappa signal | 22-1606: T3-Fap2 | NO: 9 | | residues 22-1606 |
| peptide and | domain | SEQ ID | | of SEQ ID NO: 4 |
| strep-tag | 1610-1619: | NO: 4 | | |
| | Strep-tag | | | |
| T4, with Ig | 1-21: IGk signal | SEQ ID | 43-2274 | Amino acid |
| kappa signal | 22-2252: T4-Fap2 | NO: 10 | | residues 22-2252 |
| peptide and | domain | SEQ ID | | of SEQ ID NO: 5 |
| strep-tag | 2257-2266: | NO: 5 | | |
| | Strep-tag | | | |

[0039] In some embodiments, the target antigen is one of the FL, T1, T2, T3 or T4 constructs listed above in Table 1, which correspond respectively to amino acid residues 22-3474, 22-350, 22-1059, 22-1606 or 22-2252 of SEQ ID NO:1. In some embodiments, the target antigen contains a portion of one of the constructs listed above with a portion corresponding to one of the shorter constructs listed above removed; for example, FLΔT4, FLΔT3, FLΔT2 or FLΔT1, T4ΔT3, T4ΔT2, T4ΔT1, T3ΔT2, T3ΔT1 or T2ΔT1, wherein the first referenced construct reflects the starting construct and the second referenced construct following the A represents the portion of the starting construct that is deleted to arrive at the recited fragment (which constructs correspond respectively to amino acid residues 2253-3474, 1607-3474, 1060-3474, 351-3474, 1607-2252, 1060-2252, 351-2252, 1060-1606, 351-1606 or 351-1059 of SEQ ID NO:1). In some embodiments, the target antigens are T2ΔT1 or T3ΔT1, which correspond to amino acid residues 372-1080 and 372-1627, respectively, of the reference protein Fap2 from F. nucleatum 7/1 (which constructs correspond respectively to amino acid residues 351-1059 and 351-1606 of SEQ ID NO:1). In some embodiments, the target antigen contains between 8 and 546 contiguous amino acid residues of the extracellular passenger domain of Fap2 extending between positions 1081 and 1627 of the Fap2 protein sequence from F. nucleatum 7/1 (which corresponds to amino acid residues 1060-1606 of SEQ ID NO: 1) including any value or subrange therebetween e.g. 9, 10, 11, 12, 13, 14, 15, 16, 17, 18, 19, 20, 21, 22, 23, 24, 25, 26, 27, 28, 29, 30, 40, 50, 75, 100, 200, 300, 400, or 500 contiguous amino acid residues. In some embodiments, the target antigen contains between 8 and 1256 contiguous amino acid residues of the extracellular passenger domain of Fap2 extending between positions 371 and 1627 of the reference Fap2 protein sequence from F. nucleatum 7/1 (which corresponds to amino acid residues 350 to 1606 of SEQ ID NO: 1) including any value or subrange therebetween, e.g. 9, 10, 11, 12, 13, 14, 15, 16, 17, 18, 19, 20, 21, 22, 23, 24, 25, 26, 27, 28, 29, 30, 40, 50, 75, 100, 200, 300, 400, 500. 600, 700, 800, 900, 1000, 1100, 1200, 1300, 1400, 1500 or 1600 contiguous amino acid residues.

[0040] In some embodiments, the target antigen has the amino acid sequence of any one of SEQ ID NOs: 1-5. In some embodiments, the target antigen has the amino acid sequence of any one of SEQ ID NOs: 46-80, 97-112, 120-126, or 4560-4562.

[0041] In some embodiments, the target antigen is a B-cell epitope. In some such embodiments, the target antigen has an amino acid sequence corresponding to any one of SEQ ID NOs: 127-294 shown in Table 3.

[0042] In some embodiments, the target antigen is a T-cell epitope, including a CD8+ T-cell epitope. In some such embodiments, the target antigen has an amino acid sequence corresponding to any one of SEQ ID NOs: 317-4557.

[0043] In some embodiments, the target antigens are engineered to enhance the ability of the target antigen to generate an antigenic response in a mammal, including in a human. For example, in some embodiments, the target antigens are coupled to a suitable transmembrane domain to facilitate presentation of the target antigen to stimulate an immune response in a mammal, including in a human.

[0044] In some embodiments, the target antigens are coupled to an N-terminal secretion signal to facilitate secretion of the target antigens by mammalian cells, including by human cells. In some embodiments, the signal peptide is one of: chymotrypsinogen, trypsinogen-2, interleukin-2, serum albumin preproprotein, immunoglobulin heavy chain, immunoglobulin light chain, azurocidin preproprotein, cystatin-S precursor, Ig kappa light chain precursor (mutant A2), oncostatin-M, glycoprotein G, Ig kappa chain V-III, Ig heavy chain V, SPARC, secrecon, Ig kappa chain V-I, myeloid cell surface antigen CD33, tissue-type plasminogen activator, gaussia luciferase, influenza haemagglutinin, insulin, silkworm fibroin light chain. In some embodiments, the N-terminal secretion signal is an Ig kappa signal peptide. In some embodiments, the signal peptide has one of the sequences set forth in Table 4.

TABLE 4
Signal peptide sequences.

| | Species of | | |
|---|---|---|---|
| Signal Peptide | Origin | Sequence | SEQ ID NO: |
| Chymotrypsinogen | Homo sapiens | MAFLWLLSCWALLGTTFG | SEQ ID NO: 295 |
| Trypsinogen-2 | Homo sapiens | MNLLLILTFVAAAVA | SEQ ID NO: 296 |
| Interleukin-2 | Homo sapiens | MYRMQLLSCIALSLALVTNS | SEQ ID NO: 297 |
| Serum albumin | Homo sapiens | MKWVTFISLLFLFSSAYS | SEQ ID NO: 298 |
| preproprotein | | | |
| Immunoglobulin | Homo sapiens | MDWTWRVFCLLAVTPGAHP | SEQ ID NO: 299 |
| heavy chain | | | |
| Immunoglobulin | Homo sapiens | MAWSPLFLTLITHCAGSWA | SEQ ID NO: 300 |
| light chain | | | |
| Azurocidin | Homo sapiens | MTRLTVLALLAGLLASSRA | SEQ ID NO: 301 |
| preproprotein | | | |
| Cystatin-S | Homo sapiens | MARPLCTLLLLMATLAGALA | SEQ ID NO: 302 |
| precursor | | | |
| Ig kappa light | Mus musculus | MDMRAPAGIFGFLLVLFPGYRS | SEQ ID NO: 303 |
| chain precursor | | | |
| (mutant A2 | | | |
| Oncostatin-M | Homo sapiens | MGVLLTQRTLLSLVLALLFPSMASM | SEQ ID NO: 304 |
| Glycoprotein G | Vesicular | MKCLLYLAFLFIGVNC | SEQ ID NO: 305 |
| | stomatitis | | |
| | Indiana virus | | |
| Ig kappa chain | Mus musculus | METDTLLLWVLLLWVPGSTG | SEQ ID NO: 306 |
| V-III | | | |
| Ig heavy chain V | Mus musculus | MGWSCIILFLVATATGVHS | SEQ ID NO: 307 |
| SPARC | Homo sapiens | MRAWIFFLLCLAGRALA | SEQ ID NO: 308 |
| Secrecon | Synthetic | MWWRLWWLLLLLLLLWPMVWA | SEQ ID NO: 309 |
| Ig kappa chain V-I | Homo sapiens | MDMRVPAQLLGLLLLWLRGARC | SEQ ID NO: 310 |
| Myeloid cell | Homo sapiens | MPLLLLLPLLWAGALA | SEQ ID NO: 311 |
| surface antigen | | | |
| CD33 | | | |
| Tissue-type | Homo sapiens | MDAMKRGLCCVLLLCGAVFVSPS | SEQ ID NO: 312 |
| plasminogen | | | |
| activator | | | |
| Gaussia luciferase | Gaussia | MGVKVLFALICIAVAEA | SEQ ID NO: 313 |
| | princeps | | |
| Influenza | Influenza A | MKTIIALSYIFCLVLG | SEQ ID NO: 314 |
| Haemagglutinin | virus | | |
| Insulin | Homo sapiens | MALWMRLLPLLALLALWGPDPAAA | SEQ ID NO: 315 |
| Silkworm Fibroin | Bombyx mori | MKPIFLVLLVVTSAYA | SEQ ID NO: 316 |
| light chain | | | |

[0045] In some embodiments, the target antigens are engineered to enhance the valency of the target antigen. For example, in some embodiments, the target antigens are coupled to a C-terminal transmembrane or multimerization domain to increase antigen valency. Non-limiting examples of potential transmembrane or multimerization domains that can be used to increase antigen valency include transmembrane anchors derived from T3(10), O3(33), Nsp10, Lumazine Synthase, M1 VLP, I3 (01), I52 (32), I53 (50), I32 (28), HbsAg VLP, PDGFR or B7-1, or self-assembling domains that can be used for the creation of protein nanoparticles, for example Foldon, Ferritin, E2p, mi3, AP205, or IMX313. In some embodiments, alternative transmembrane domains such as the transmembrane domains from CD28, CD8, CD86, FasL, IgM or the like are used.

[0046] In some embodiments, nucleic acid constructs encoding the amino acid sequence of any of the foregoing target antigens, including the foregoing engineered target antigens, are provided. In some embodiments, the nucleic acid constructs are DNA constructs, for example suitable vectors for expressing the target antigens, e.g. in a mammalian cell, including in a human cell. In some embodiments, the nucleic acid constructs are mRNA constructs capable of expressing the target antigens, e.g. in a mammalian cell, including in a human cell.

[0047] In some embodiments, the nucleic acid constructs have the nucleotide sequence of any one of SEQ ID NOs: 6-10, 11-45, 81-96, or 113-119.

[0048] In some embodiments, the target antigen or a nucleic acid construct encoding the target antigen is used to stimulate an immune response in a mammal, including in a human. In some embodiments, the target antigen or nucleic acid construct encoding the target antigen is administered to a subject as a vaccine, to stimulate an immune response against Fusobacterium spp. in the subject. In various embodiments, any suitable type of vaccine can be used to deliver the target antigen to a subject to stimulate an immune response against Fusobacterium spp., for example an mRNA vaccine; a viral vector vaccine; a DNA plasmid vaccine, or any other suitable type of vaccine currently known or developed in future.

[0049] In some embodiments, the target antigen or a nucleic acid construct encoding the target antigen is used to produce an antibody, for example a monoclonal antibody. The antibody is then administered to a subject to stimulate an immune response against Fusobacterium spp. in the subject, for example to treat cancer or other disorders.

[0050] In some embodiments, target antigens, vaccines and/or antibodies as described herein are administered to a subject to induce an immunological response against Fusobacterium spp. In some embodiments, target antigens, vaccines and/or antibodies as described herein are administered to a subject to prevent or treat a cancer. Specifically, since Fusobacterium spp. is implicated in chemoresistance, cancer recurrence, adverse outcomes, poor patient prognosis and the like, achieving a reduction or elimination of the Fusobacterium spp. can help to treat a cancer, including a chemoresistant cancer, can help to prevent recurrence of the cancer, can improve patient outcomes, can improve patient prognosis, and the like. In some embodiments, a reduction or elimination of Fusobacterium spp. is achieved by administering to a subject a target antigen, a vaccine, or an antibody as described in this specification. In some embodiments, the administration of such a target antigen, vaccine or antibody can prevent or mitigate chemoresistance of Fusobacterium spp. positive cancers, can prevent re-colonization of a cancer with Fusobacterium spp., can extend a period of cancer remission in a patient that has received treatment for the cancer, and/or can help to prevent metastatic spread of a localized cancer which may be facilitated by Fusobacterium spp.

[0051] In some embodiments, a target antigen, vaccine and/or antibody as described herein is administered to a subject in conjunction with a conventional cancer therapy (e.g. surgery, chemotherapy and/or radiation therapy). Because the target antigen, vaccine and/or antibody acts to reduce or eliminate Fusobacterium spp. and can therefore limit the negative effects that the presence of this bacteria can have in cancer patients, such treatment can improve outcomes for the cancer patient. In some such embodiments, the target antigen, vaccine and/or antibody can be administered as an adjuvant therapy to the cancer treatment (i.e. as an additional treatment given after the primary cancer treatment has been provided). In other such embodiments, the target antigen, vaccine and/or antibody can be administered as a neoadjuvant therapy to the cancer treatment (i.e. as an additional treatment administered prior to the primary cancer treatment is provided).

[0052] In some embodiments, the cancer is colorectal cancer (CRC), oral squamous cell carcinoma, oral/head or neck cancer, head and neck squamous cell carcinoma, esophageal cancer, esophageal squamous cell carcinoma, human papillomavirus positive oropharyngeal squamous cell carcinoma, gastric cardia adenocarcinoma, gastric cancer, Helicobacter pylori-positive gastric cancer, pancreatic cancer, stomach cancer, breast cancer, bladder cancer, cervical cancer, laryngeal squamous cell carcinoma, lung cancer, biliary tract cancer, or melanoma. In some embodiments, the cancer is gastrointestinal cancer. In some embodiments, the gastrointestinal cancer is colorectal cancer.

[0053] In some embodiments, given the role that Fusobacterium spp. can play in driving adverse pregnancy outcomes, achieving a reduction or elimination of the Fusobacterium spp. can ameliorate or avoid such an adverse pregnancy outcome. In some embodiments, the reduction or elimination of Fusobacterium spp. is achieved by the administration to a subject of a target antigen, a vaccine or an antibody as disclosed in this specification. In some embodiments, the adverse pregnancy outcomes that are avoided by such administration can include pre-term birth, miscarriages, chorioamnionitis, neonatal sepsis, or preeclampsia.

[0054] In some embodiments, given the role that Fusobacterium spp. can play in dental diseases including periodontitis, autoimmune diseases including irritable bowel syndrome, atherosclerotic disease, rheumatoid arthritis, and various infections including appendicitis, sepsis or tissue abscesses, a method of treating such disease or infection is provided in which a target antigen, a vaccine or an antibody as disclosed in this specification is administered to a subject to achieve a reduction or elimination of Fusobacterium spp. in the subject.

[0055] In some embodiments, traditional antibacterial treatments such as antibiotics can be used in combination with the target antigens, vaccines and/or antibodies as disclosed in this specification to provide a combination therapy for reducing or eliminating Fusobacterium spp. in a subject. For example, a suitable antibiotic such as metronidazole is administered to the subject to reduce or eliminate an infection or colonization of Fusobacterium spp. A target antigen and/or vaccine as described in this specification is then administered to the subject to prevent re-infection or re-colonization of the Fusobacterium spp. in the subject.

[0056] In some embodiments, the administration of a target antigen, vaccine and/or antibody as disclosed in this specification to a subject induces production of Fap2-specific neutralizing antibodies by the subject and/or evokes a CD8+ T cell response that targets host cells that have been invaded by Fusobacterium spp.

[0057] In some embodiments, the administration of a target antigen, vaccine and/or antibody as disclosed in this specification to a subject prevents immunosuppression in the subject that can be caused by Fusobacterium spp. via a Fap2 blockade of TIGIT (T cell immunoreceptors with Ig and ITIM domains) in the subject.

[0058] In some embodiments, the administration of a target antigen, vaccine and/or antibody as disclosed in this specification to a subject disrupts an interaction between Fap2 of Fusobacterium spp. and a GalGal-Nac molecule within the subject.

[0059] In some embodiments, the Fusobacterium spp. is F. nucleatum. In some embodiments, the Fusobacterium spp. is F. nucleatum 7/1, F. nucleatum ATCC23726, F. nucleatum ChDC-F317, F. nucleatum Fn3-1-27, F. nucleatum Fn3-1-36A2, F. nucleatum Fn4-8, F. nucleatum Fn71, F. nucleatum KCOM-1322, F. nucleatum KCOM-2931, or F. nucleatum MGYG-HGUT-01347.

[0060] In some embodiments, the subject is a mammalian subject. In some embodiments, the subject is a human subject.

### EXAMPLES

[0061] Certain embodiments are further described with reference to the following examples, which are intended to be illustrative and not limiting in nature.

### Example 1.0

### Structure-Based Approach to Design Fap2-Derived Antigens

[0062] Type Va autotransporters are large and extremely complicated polypeptides. Therefore, to create Fap2-derived antigens amenable to the design of a vaccine, a structure-based approach was employed. Alphafold2 was used to generate an in silico prediction of the Fap2 structure from Fusobacterium ssp.

[0063] FIG. 1 shows the predicted structure of Fap2 and its associated domains based on the structure-based approach using Alphafold2. The full Fap2 protein sequence from F. nucleatum 7/1 is 3799 amino acids long. To make the structure prediction computationally tractable, the 41 amino acid N-terminal signal sequence was first removed, and the resulting 3758 amino acid protein was broken into four 2000 amino acid fragments overlapping by 800 amino acids (except for the last fragment which overlapped by 1843 amino acids). Each fragment was analyzed using AlphaFold2 and the highest confidence model for each fragment was selected. The overlapping sections were aligned, trimmed, and merged using ChimeraX to generate the full-length structure, which is comprised of the extracellular passenger domain, an α-helical linker, and a transmembrane β-barrel (these domains are marked at the top of the FIG. 1 by horizontal black lines). The predicted structure of the amino acid strand located at the N-terminal of the passenger domain had low confidence, and thus the structure of the strand was predicted independently and manually added to the remainder of the assembled protein structure.

### Example 2.0

### Antigen Selection and Preparation of Constructs

[0064] Based on the predicted structure of Fap2, the passenger domain was selected as the vaccine antigen. Sequence conservation was measured across nine F. nucleatum subsp., measuring the number of positions in a 51 amino acid sliding window where all nine subsp. had the same amino acid sequences. Sequence conservation of Fap2 between the nine F. nucleatum subsp. are shown in the structure of FIG. 1 using shading-white for an exact match for all subsp. and black for 33% of amino acids matching in all subsp. Overall, 78.2% of sites are identical across a multiple sequence alignment of Fap2 from F. nucleatum 7/1, ATCC23726, ChDC-F317, Fn3-1-27, Fn3-1-36A2, Fn4-8, KCOM-1322, KCOM-2931 and MGYG-HGUT-01347.

[0065] Five truncations of the Fap2 passenger domain were designed and constructed which contain regions of varying strain-specificity. These truncations are demarcated by the black horizontal lines at the bottom of FIG. 1 as T1, T2, T3, T4, and “Full Length” [FL]. Designs were codon-optimized with regards to both expression in human cells and the best-practices of mRNA design. In addition, an N-terminal secretion signal (Ig kappa signal peptide) and a C-terminal strep-tag were added to the designs, facilitating antigen secretion and antigen detection/purification, respectively. The resulting constructs were synthesized as DNA fragments and assembled using a BsaI-based Golden Gate Assembly reaction. Resulting sequences were then assembled using a paqCl-based Golden Gate Assembly reaction into a plasmid containing: a CMV promoter, for plasmid-borne expression in eukaryotic cells; a T7 promoter, for the in vitro transcription of mRNA; as well as, an α-globin 5′-UTR, a tandem β-globin 3′UTR, and a bisected poly (A) tail.

### Example 3.0

### Expression of Antigens in Eukaryotic Cells

[0066] As shown in FIG. 2, flow cytometry detection of StrepTagII expression in secreted Fap2 truncation (T1, T2, T3, T4 and FL from F. nucleatum 7/1) pDNA transfectants was carried out. HEK293T/17 cells were plated at 2.5ml/well (540,000 cells/ml) in 6-well plates ˜18 hours prior to transfection. Cells were transfected with ˜2.5 ug of plasmid DNA using TransIT-LT1. Cells were harvested for analysis at ˜48 hours following transfection. Cells were stained with Fixable Viability Dye eFluor780 for 30 mins, fixed with 4% formaldehyde for 15 mins, permeabilized with cell permeablization buffer for 10 mins, and then stained with FITC-conjugated mouse anti-StrepTagII antibody for 30 mins. Cells were analyzed on a BD Fortessa flow cytometer. Resulting events were gated to isolate singlet live cells, and StrepTagII-positivity was determined relative to an unstained control. All transfections were performed in duplicate. Bars represent the mean StrepTagII-positivity, and error bars represent the standard error of the mean.

[0067] As shown in FIG. 2, all designs expressed their antigen. Without being bound, expression level of antigen appeared to be size-dependent for the tested constructs.

### Example 4.0-Testing immunogenicity of mRNA-LNP delivered Fap2 antigens

[0068] To test the immunogenicity of mRNA-LNP delivered Fap2 antigens, a boost-prime strategy was employed in mice. An in vivo experiment was designed to test mRNA-LNP delivery of Fap2-derived antigens for immunogenicity. Female HLA-A2 (C57BL/6-MCPH1-Tg (HLA-A2.1) 1Enge/J strain) humanized mice (n=4-5 per group) were vaccinated with 1 μg of Fap2 mRNA-LNP complexes or RFP mRNA-LNP complexes (negative control) using a prime-boost regimen. Specifically, mice were injected with 1 ug prime vaccine doses on day 0. Subsequently, 21 days after prime inoculation, mice were injected with 1 ug boost vaccine doses. Finally, 14 days after boost inoculation, mice were euthanized and samples were collected for evaluation of immunogenicity against F. nucleatum. Vaccinations were given via IM injection. Blood samples were collected and processed to isolate plasma or serum, as noted.

[0069] In accordance with the strategy summarized above and as shown in FIG. 3, plasma was harvested from the Fap2 mRNA-LNP immunized mice at week 4 (i.e. 14 days after boost inoculation) and examined for Fap2-specific antibodies. The reactivity of the secreted Fap2 truncation vaccine plasma pools to Fap2-FL was evaluated.

[0070] To examine for Fap2-specific antibodies, HEK293T/17 cells were transfected with Fap2-FL-Sec-Strep plasmid DNA using TransIT-LT1. At ˜48 hours following transfection, transfectant media was collected. Transfectant media was then used to coat pre-blocked streptavidin-coated 96-well plates (95 ul of media/well) after washing the plates 3× with ELISA wash buffer. Plates were incubated for 90 mins at 4 C to allow for antigen binding. Following coating, plates were washed 3× with ELISA wash buffer and 100 ul of diluted plasma samples were added to wells in duplicate. Plates were incubated at 4 C overnight. Following overnight incubation, the plates were washed 5× with ELISA wash buffer, and 100 ul of HRP-conjugated goat anti-mouse IgG antibody (1/2000 dilution) was added per well and allowed to incubate at RT for 2.5 hours. Plates were washed 5× with ELISA wash buffer, and 100 ul of TMB substrate solution was added per well. Reactions were allowed to develop for ˜20 mins, then 100 ul of ELISA stop solution was added and OD450 was measured. Each plasma sample was assayed in duplicate. Facets in FIG. 3 represent dilutions of plasma (100-fold, 200-fold, 400-fold, 800-fold, or 1600-fold). Bars represent the mean OD450, and error bars represent the standard error of the mean.

[0071] As shown in FIG. 3, relative to controls, immunization with Fap2-derived antigens resulted in antibodies that could specifically detect recombinant Fap2. The negative control was mSb (mStrawberry red fluorescent protein). The results of this example demonstrate that the tested target Fap2 antigens (T1, T2, T3, T4 and FL from F. nucleatum 7/1) are able to stimulate an immune response when delivered in vivo to a mammal.

[0072] As shown in FIG. 4, secreted Fap2 truncation vaccine plasma pools similarly exhibited reactivity to Fap2-T2 and Fap2-T3 in addition to Fap2-FL. To examine for Fap2-specific antibodies, HEK293T/17 cells were transfected with Fap2-T2-Sec-Strep or Fap2-T3-Sec-Strep plasmid DNA using TransIT-LT1. At ˜48 hours following transfection, transfectant media was collected. Negative control (untransfected) media was also collected. Transfectant or negative control media was then used to coat pre-blocked streptavidin-coated 96-well plates (100 ul of media/well) after washing the plates 3× with ELISA wash buffer. Plates were incubated for 2 hours at 4 C to allow for antigen binding. Following coating, plates were washed 3× with ELISA wash buffer and 100 ul of diluted plasma samples were added to wells in duplicate. Plates were incubated at 4 C overnight. Following overnight incubation, the plates were washed 3× with ELISA wash buffer, and 100 ul of HRP-conjugated goat anti-mouse IgG antibody (1/2000 dilution) was added per well and allowed to incubate at RT for 2 hours. Plates were washed 3× with ELISA wash buffer, and 100 ul of TMB substrate solution was added per well. Reactions were allowed to develop for ˜8 mins, then 100 ul of ELISA stop solution was added and OD450 was measured. Each plasma sample was assayed in duplicate. Facets represent dilutions of plasma (100-fold, 200-fold, 400-fold, 800-fold, or 1600-fold). Bars represent the mean OD450, and error bars represent the standard error of the mean.

### Example 5.0

### Development of Further Constructs for Improved Immunogenicity

[0073] To further improve the immunogenicity of the Fap2 antigens, a series of constructs were designed that provide increased antigen valency. These constructs contain a N-terminal secretion signal (an lg kappa signal peptide) that facilitates antigen secretion, a Fap2-antigenic domain (T1, T2, T3, T4, or “Full Length” [FL] from F. nucleatum 7/1), and a C-terminal transmembrane domain or multimerization domain (i.e. a self-assembling domain) that increases antigen valency. Eight such domains were chosen: two transmembrane anchors, derived from PDGFR and B7-1, respectively; and six self-assembling domains for the creation of protein nanoparticles, Foldon, Ferritin, E2p, mi3, AP205, and IMX313.

[0074] To further improve the immunogenicity of the Fap2 antigens, minimal antigens that remove the predicted N-terminal disordered region were created. These antigens, T2ΔT1 and T3ΔT1, correspond to amino acid residues 372-1080 and 372-1627, respectively, of Fap2 from F. nucleatum 7/1 (3799 aa in length). In addition, these antigen constructs contain N-terminal secretion signals (an Ig kappa signal peptide) that facilitate antigen secretion, and various C-terminal domains that allow for either soluble secretion of monomeric antigen, or increased antigen valency. Nine C-terminal domains were used: A strep-tag; two transmembrane anchors, derived from PDGFR and B7-1, respectively; and six self-assembling domains for the creation of protein nanoparticles, Foldon, Ferritin, E2p, mi3, AP205, and IMX313. In some embodiments, each of the foregoing C-terminal domains may further be provided with a strep-tag, for example at the C-terminal portion of the transmembrane anchor or the self-assembling domain.

TABLE 2
Fap2 antigen targets with increased valency and/or increased immunogenicity.

| | | | Amino Acid |
|---|---|---|---|
| | | | Positions of |
| | | Amino Acid | Corresponding |
| Construct | DNA Sequence | Sequence | Features |
| FL-Fap2 with Ig kappa | SEQ ID NO: 11 | SEQ ID NO: 46 | 1-21: Ig kappa signal |
| signal peptide and AP205 | | | peptide |
| self-assembling domain | | | 22-3474: FL-Fap2 |
| | | | domain |
| | | | 3487-3617: AP205 |
| | | | domain |
| FL-Fap2 with Ig kappa | SEQ ID NO: 12 | SEQ ID NO: 47 | 1-21: Ig kappa signal |
| signal peptide, strep-tag, | | | peptide |
| and B7-1 transmembrane | | | 22-3474: FL-Fap2 |
| anchor | | | domain |
| | | | 3479-3548: B7 |
| | | | transmembrane |
| | | | domain |
| | | | 3552-3561: Strep-tag |
| FL-Fap2 with Ig kappa | SEQ ID NO: 13 | SEQ ID NO: 48 | 1-21: Ig kappa signal |
| signal peptide and E2p | | | peptide |
| self-assembling domain | | | 22-3474: FL-Fap2 |
| | | | domain |
| | | | 3487-3740: E2p |
| | | | domain |
| FL-Fap2 with Ig kappa | SEQ ID NO: 14 | SEQ ID NO: 49 | 1-21: Ig kappa signal |
| signal peptide and Ferritin | | | peptide |
| self-assembling domain | | | 22-3474: FL-Fap2 |
| | | | domain |
| | | | 3487-3659: Ferritin |
| | | | domain |
| FL-Fap2 with Ig kappa | SEQ ID NO: 15 | SEQ ID NO: 50 | 1-21: Ig kappa signal |
| signal peptide and Foldon | | | peptide |
| self-assembling domain | | | 22-3474: FL-Fap2 |
| | | | domain |
| | | | 3487-3513: Foldon |
| | | | domain |
| FL-Fap2 with Ig kappa | SEQ ID NO: 16 | SEQ ID NO: 51 | 1-21: Ig kappa signal |
| signal peptide and mi3 | | | peptide |
| self-assembling domain | | | 22-3474: FL-Fap2 |
| | | | domain |
| | | | 3487-3691: mi3 |
| | | | domain |
| FL-Fap2 with Ig kappa | SEQ ID NO: 17 | SEQ ID NO: 52 | 1-21: Ig kappa signal |
| signal peptide, strep-tag, | | | peptide |
| and PDGFR | | | 22-3474: FL-Fap2 |
| transmembrane anchor | | | domain |
| | | | 3479-3527: PDGFR |
| | | | transmembrane |
| | | | domain |
| | | | 3531-3540: Strep-tag |
| T1 antigen of Fap2 with Ig | SEQ ID NO: 18 | SEQ ID NO: 53 | 1-21: Ig kappa signal |
| kappa signal peptide and | | | peptide |
| AP205 self-assembling | | | 22-350: T1-Fap2 |
| domain | | | domain |
| | | | 363-493: AP205 |
| | | | domain |
| T1 antigen of Fap2 with Ig | SEQ ID NO: 19 | SEQ ID NO: 54 | 1-21: Ig kappa signal |
| kappa signal peptide, | | | peptide |
| strep-tag, and B7-1 | | | 22-350: T1-Fap2 |
| transmembrane anchor | | | domain |
| | | | 355-424: B7 |
| | | | transmembrane |
| | | | domain |
| | | | 428-437: Strep-tag |
| T1 antigen of Fap2 with Ig | SEQ ID NO: 20 | SEQ ID NO: 55 | 1-21: Ig kappa signal |
| kappa signal peptide and | | | peptide |
| E2p self-assembling | | | 22-350: T1-Fap2 |
| domain | | | domain |
| | | | 363-616: E2p domain |
| T1 antigenic domain of | SEQ ID NO: 21 | SEQ ID NO: 56 | 1-21: Ig kappa signal |
| Fap2 with Ig kappa signal | | | peptide |
| peptide and Ferritin self- | | | 22-350: T1-Fap2 |
| assembling domain | | | domain |
| | | | 363-535: Ferritin |
| | | | domain |
| T1 antigen of Fap2 with Ig | SEQ ID NO: 22 | SEQ ID NO: 57 | 1-21: Ig kappa signal |
| kappa signal peptide and | | | peptide |
| Foldon self-assembling | | | 22-350: T1-Fap2 |
| domain | | | domain |
| | | | 363-389: Foldon |
| | | | domain |
| T1 antigen of Fap2 with Ig | SEQ ID NO: 23 | SEQ ID NO: 58 | 1-21: Ig kappa signal |
| kappa signal peptide and | | | peptide |
| mi3 self-assembling | | | 22-350: T1-Fap2 |
| domain | | | domain |
| | | | 363-567: mi3 domain |
| T1 antigen of Fap2 with Ig | SEQ ID NO: 24 | SEQ ID NO: 59 | 1-21: Ig kappa signal |
| kappa signal peptide, | | | peptide |
| strep-tag, and PDGFR | | | 22-350: T1-Fap2 |
| transmembrane anchor | | | domain |
| | | | 355-403: PDGFR |
| | | | transmembrane |
| | | | domain |
| | | | 407-416: Strep-tag |
| T2 antigen of Fap2 with Ig | SEQ ID NO: 25 | SEQ ID NO: 60 | 1-21: Ig kappa signal |
| kappa signal peptide and | | | 22-1059: T2-Fap2 |
| AP205 self-assembling | | | domain |
| domain | | | 1072-1202: AP205 |
| | | | domain |
| T2 antigen of Fap2 with Ig | SEQ ID NO: 26 | SEQ ID NO: 61 | 1-21: Ig kappa signal |
| kappa signal peptide, | | | peptide |
| strep-tag, and B7-1 | | | 22-1059: T2-Fap2 |
| transmembrane anchor | | | domain |
| | | | 1064-1133: B7 |
| | | | transmembrane |
| | | | domain |
| | | | 1137-1146: Strep-tag |
| T2 antigen of Fap2 with Ig | SEQ ID NO: 27 | SEQ ID NO: 62 | 1-21: Ig kappa signal |
| kappa signal peptide and | | | peptide |
| E2p self-assembling | | | 22-1059: T2-Fap2 |
| domain | | | domain |
| | | | 1072-1325: E2p |
| | | | domain |
| T2 antigen of Fap2 with Ig | SEQ ID NO: 28 | SEQ ID NO: 63 | 1-21: Ig kappa signal |
| kappa signal peptide and | | | peptide |
| Ferritin self-assembling | | | 22-1059: T2-Fap2 |
| domain | | | domain |
| | | | 1072-1244: Ferritin |
| | | | domain |
| T2 antigen of Fap2 with Ig | SEQ ID NO: 29 | SEQ ID NO: 64 | 1-21: Ig kappa signal |
| kappa signal peptide and | | | peptide |
| Foldon self-assembling | | | 22-1059: T2-Fap2 |
| domain | | | domain |
| | | | 1072-1098: Foldon |
| | | | domain |
| T2 antigen of Fap2 with Ig | SEQ ID NO: 30 | SEQ ID NO: 65 | 1-21: Ig kappa signal |
| kappa signal peptide and | | | peptide |
| mi3 self-assembling | | | 22-1059: T2-Fap2 |
| domain | | | domain |
| | | | 1072-1276: mi3 |
| | | | domain |
| T2 antigen of Fap2 with Ig | SEQ ID NO: 31 | SEQ ID NO: 66 | 1-21: Ig kappa signal |
| kappa signal peptide, | | | peptide |
| strep-tag, and PDGFR | | | 22-1059: T2-Fap2 |
| transmembrane anchor | | | domain |
| | | | 1064-1112: PDGFR |
| | | | transmembrane |
| | | | domain |
| | | | 1116-1125: Strep-tag |
| T3 antigen of Fap2 with Ig | SEQ ID NO: 32 | SEQ ID NO: 67 | 1-21: Ig kappa signal |
| kappa signal peptide and | | | 22-1606: T3-Fap2 |
| AP205 self-assembling | | | domain |
| domain | | | 1619-1749: AP205 |
| | | | domain |
| T3 antigen of Fap2 with Ig | SEQ ID NO: 33 | SEQ ID NO: 68 | 1-21: Ig kappa signal |
| kappa signal peptide, | | | peptide |
| strep-tag, and B7-1 | | | 22-1606: T3-Fap2 |
| transmembrane anchor | | | domain |
| | | | 1611-1680: B7 |
| | | | transmembrane |
| | | | domain |
| | | | 1684-1693: Strep-tag |
| T3 antigen of Fap2 with Ig | SEQ ID NO: 34 | SEQ ID NO: 69 | 1-21: Ig kappa signal |
| kappa signal peptide and | | | peptide |
| E2p self-assembling | | | 22-1606: T3-Fap2 |
| domain | | | domain |
| | | | 1619-1872: E2p |
| | | | domain |
| T3 antigen of Fap2 with Ig | SEQ ID NO: 35 | SEQ ID NO: 70 | 1-21: Ig kappa signal |
| kappa signal peptide and | | | peptide |
| Ferritin self-assembling | | | 22-1606: T3-Fap2 |
| domain | | | domain |
| | | | 1619-1791: Ferritin |
| | | | domain |
| T3 antigen of Fap2 with Ig | SEQ ID NO: 36 | SEQ ID NO: 71 | 1-21: Ig kappa signal |
| kappa signal peptide and | | | peptide |
| Foldon self-assembling | | | 22-1606: T3-Fap2 |
| domain | | | domain |
| | | | 1619-1645: Foldon |
| | | | domain |
| T3 antigen of Fap2 with Ig | SEQ ID NO: 37 | SEQ ID NO: 72 | 1-21: Ig kappa signal |
| kappa signal peptide and | | | peptide |
| mi3 self-assembling | | | 22-1606: T3-Fap2 |
| domain | | | domain |
| | | | 1619-1823: mi3 |
| | | | domain |
| T3 antigen of Fap2 with Ig | SEQ ID NO: 38 | SEQ ID NO: 73 | 1-21: Ig kappa signal |
| kappa signal peptide, | | | peptide |
| strep-tag, and PDGFR | | | 22-1606: T3-Fap2 |
| transmembrane anchor | | | domain |
| | | | 1611-1659: PDGFR |
| | | | transmembrane |
| | | | domain |
| | | | 1663-1672: Strep-tag |
| T4 antigen of Fap2 with Ig | SEQ ID NO: 39 | SEQ ID NO: 74 | 1-21: Ig kappa signal |
| kappa signal peptide and | | | 22-2252: T4-Fap2 |
| AP205 self-assembling | | | domain |
| domain | | | 2266-2396: AP205 |
| | | | domain |
| T4 antigen of Fap2 with Ig | SEQ ID NO: 40 | SEQ ID NO: 75 | 1-21: Ig kappa signal |
| kappa signal peptide, | | | peptide |
| strep-tag, and B7-1 | | | 22-2252: T4-Fap2 |
| transmembrane anchor | | | domain |
| | | | 2258-2327: B7 |
| | | | transmembrane |
| | | | domain |
| | | | 2331-2340: Strep-tag |
| T4 antigen of Fap2 with Ig | SEQ ID NO: 41 | SEQ ID NO: 76 | 1-21: Ig kappa signal |
| kappa signal peptide and | | | peptide |
| E2p self-assembling | | | 22-2252: T4-Fap2 |
| domain | | | domain |
| | | | 2266-2519: E2p |
| | | | domain |
| T4 antigen of Fap2 with Ig | SEQ ID NO: 42 | SEQ ID NO: 77 | 1-21: Ig kappa signal |
| kappa signal peptide and | | | peptide |
| Ferritin self-assembling | | | 22-2252: T4-Fap2 |
| domain | | | domain |
| | | | 2266-2438: Ferritin |
| | | | domain |
| T4 antigen of Fap2 with Ig | SEQ ID NO: 43 | SEQ ID NO: 78 | 1-21: Ig kappa signal |
| kappa signal peptide and | | | peptide |
| Foldon self-assembling | | | 22-2252: T4-Fap2 |
| domain | | | domain |
| | | | 2266-2292: Foldon |
| | | | domain |
| T4 antigen of Fap2 with Ig | SEQ ID NO: 44 | SEQ ID NO: 79 | 1-21: Ig kappa signal |
| kappa signal peptide and | | | peptide |
| mi3 self-assembling | | | 22-2252: T4-Fap2 |
| domain | | | domain |
| | | | 2266-2470: mi3 |
| | | | domain |
| T4 antigen of Fap2 with Ig | SEQ ID NO: 45 | SEQ ID NO: 80 | 1-21: Ig kappa signal |
| kappa signal peptide, | | | peptide |
| strep-tag, and PDGFR | | | 22-2252: T4-Fap2 |
| transmembrane anchor | | | domain |
| | | | 2258-2306: PDGFR |
| | | | transmembrane |
| | | | domain |
| | | | 2310-2319: Strep-tag |
| T2ΔT1 antigen of Fap2 | SEQ ID NO: 81 | SEQ ID NO: 97 | 1-21: Ig kappa signal |
| with Ig kappa signal | | | 23-730: T2ΔT1-Fap2 |
| peptide and strep-tag | | | domain |
| | | | 734-743: Strep-tag |
| T2ΔT1 antigen of Fap2 | SEQ ID NO: 82 | SEQ ID NO: 98 | 1-21: Ig kappa signal |
| with Ig kappa signal | | | 23-730: T2ΔT1-Fap2 |
| peptide and AP205 self- | | | domain |
| assembling domain | | | 743-873: AP205 |
| | | | domain |
| T2ΔT1 antigen of Fap2 | SEQ ID NO: 83 | SEQ ID NO: 99 | 1-21: Ig kappa signal |
| with Ig kappa signal | | | peptide |
| peptide, strep-tag, and B7- | | | 23-730: T2ΔT1-Fap2 |
| 1 transmembrane anchor | | | domain |
| | | | 735-804: B7 |
| | | | transmembrane |
| | | | domain |
| | | | 808-817: Strep-tag |
| T2ΔT1 antigen of Fap2 | SEQ ID NO: 84 | SEQ ID NO: 100 | 1-21: Ig kappa signal |
| with Ig kappa signal | | | 23-730: T2ΔT1-Fap2 |
| peptide and E2p self- | | | domain |
| assembling domain | | | 743-996: E2p domain |
| T2ΔT1 antigen of Fap2 | SEQ ID NO: 85 | SEQ ID NO: 101 | 1-21: Ig kappa signal |
| with Ig kappa signal | | | 23-730: T2ΔT1-Fap2 |
| peptide and Ferritin self- | | | domain |
| assembling domain | | | 743-915: Ferritin |
| | | | domain |
| T2ΔT1 antigen of Fap2 | SEQ ID NO: 86 | SEQ ID NO: 102 | 1-21: Ig kappa signal |
| with Ig kappa signal | | | 23-730: T2ΔT1-Fap2 |
| peptide and Foldon self- | | | domain |
| assembling domain | | | 743-769: Foldon |
| | | | domain |
| T2ΔT1 antigen of Fap2 | SEQ ID NO: 87 | SEQ ID NO: 103 | 1-21: Ig kappa signal |
| with Ig kappa signal | | | 23-730: T2ΔT1-Fap2 |
| peptide and mi3 self- | | | domain |
| assembling domain | | | 743-947: mi3 domain |
| T2ΔT1 antigen of Fap2 | SEQ ID NO: 88 | SEQ ID NO: 104 | 1-21: Ig kappa signal |
| with Ig kappa signal | | | 23-730: T2ΔT1-Fap2 |
| peptide, strep-tag, and | | | domain |
| PDGFR transmembrane | | | 735-783: PDGFR |
| anchor | | | transmembrane |
| | | | domain |
| | | | 787-796: Strep-tag |
| T3ΔT1 antigen of Fap2 | SEQ ID NO: 89 | SEQ ID NO: 105 | 1-21: Ig kappa signal |
| with Ig kappa signal | | | 23-1277: T3ΔT1-Fap2 |
| peptide and strep-tag | | | domain |
| | | | 1281-1290: Strep-tag |
| T3ΔT1 antigen of Fap2 | SEQ ID NO: 90 | SEQ ID NO: 106 | 1-21: Ig kappa signal |
| with Ig kappa signal | | | 23-1277: T3ΔT1-Fap2 |
| peptide and AP205 self- | | | domain |
| assembling domain | | | 1290-1420: AP205 |
| | | | domain |
| T3ΔT1 antigen of Fap2 | SEQ ID NO: 91 | SEQ ID NO: 107 | 1-21: Ig kappa signal |
| with Ig kappa signal | | | peptide |
| peptide, strep-tag, and B7- | | | 23-1277: T3ΔT1-Fap2 |
| 1 transmembrane anchor | | | domain |
| | | | 1282-1351: B7 |
| | | | transmembrane |
| | | | domain |
| | | | 1355-1364: Strep-tag |
| T3ΔT1 antigen of Fap2 | SEQ ID NO: 92 | SEQ ID NO: 108 | 1-21: Ig kappa signal |
| with Ig kappa signal | | | 23-1277: T3ΔT1-Fap2 |
| peptide and E2p self- | | | domain |
| assembling domain | | | 1290-1543: E2p |
| | | | domain |
| T3ΔT1 antigen of Fap2 | SEQ ID NO: 93 | SEQ ID NO: 109 | 1-21: Ig kappa signal |
| with Ig kappa signal | | | 23-1277: T3ΔT1-Fap2 |
| peptide and Ferritin self- | | | domain |
| assembling domain | | | 1290-1462: Ferritin |
| | | | domain |
| T3ΔT1 antigen of Fap2 | SEQ ID NO: 94 | SEQ ID NO: 110 | 1-21: Ig kappa signal |
| with Ig kappa signal | | | 23-1277: T3ΔT1-Fap2 |
| peptide and Foldon self- | | | domain |
| assembling domain | | | 1290-1316: Foldon |
| | | | domain |
| T3ΔT1 antigen of Fap2 | SEQ ID NO: 95 | SEQ ID NO: 111 | 1-21: Ig kappa signal |
| with Ig kappa signal | | | 23-1277: T3ΔT1-Fap2 |
| peptide and mi3 self- | | | domain |
| assembling domain | | | 1290-1494: mi3 |
| | | | domain |
| T3ΔT1 antigen of Fap2 | SEQ ID NO: 96 | SEQ ID NO: 112 | 1-21: Ig kappa signal |
| with Ig kappa signal | | | 23-1277: T3ΔT1-Fap2 |
| peptide, strep-tag, and | | | domain |
| PDGFR transmembrane | | | 1282-1330: PDGFR |
| anchor | | | transmembrane |
| | | | domain |
| | | | 1334-1343: Strep-tag |
| FL-Fap2 with Ig kappa | SEQ ID NO: 113 | SEQ ID NO: 120 | 1-21: Ig kappa signal |
| signal peptide and IMX313 | | | 22-3474: FL-Fap2 |
| multimerization domain | | | domain |
| | | | 3487-3541: IMX313 |
| | | | domain |
| T1 antigen domain of Fap | SEQ ID NO: 114 | SEQ ID NO: 121 | 1-21: Ig kappa signal |
| 2 with Ig kappa signal | | | 22-350: T1-Fap2 |
| peptide and IMX313 | | | domain |
| multimerization domain | | | 363-417: IMX313 |
| | | | domain |
| T2 antigen domain of Fap | SEQ ID NO: 115 | SEQ ID NO: 122 | 1-21: Ig kappa signal |
| 2 with Ig kappa signal | | | 22-1059: T2-Fap2 |
| peptide and IMX313 | | | domain |
| multimerization domain | | | 1072-1126: IMX313 |
| | | | domain |
| T2ΔT1 antigen domain of | SEQ ID NO: 116 | SEQ ID NO: 123 | 1-21: Ig kappa signal |
| Fap 2 with Ig kappa signal | | | 23-730: T2ΔT1-Fap2 |
| peptide and IMX313 | | | domain |
| multimerization domain | | | 743-797: IMX313 |
| | | | domain |
| T3 antigen domain of Fap | SEQ ID NO: 117 | SEQ ID NO: 124 | 1-21: Ig kappa signal |
| 2 with Ig kappa signal | | | 22-1606: T3-Fap2 |
| peptide and IMX313 | | | domain |
| multimerization domain | | | 1619-1673: IMX313 |
| | | | domain |
| T3ΔT1 antigen domain of | SEQ ID NO: 118 | SEQ ID NO: 125 | 1-21: Ig kappa signal |
| Fap 2 with Ig kappa signal | | | 23-1277: T3ΔT1-Fap2 |
| peptide and IMX313 | | | domain |
| multimerization domain | | | 1290-1344: IMX313 |
| | | | domain |
| T4 antigen domain of Fap | SEQ ID NO: 119 | SEQ ID NO: 126 | 1-21: Ig kappa signal |
| 2 with Ig kappa signal | | | 22-2252: T4-Fap2 |
| peptide and IMX313 | | | domain |
| multimerization domain | | | 2266-2320: IMX313 |
| | | | domain |

### Example 6.0

### Expression of FLAG-Tagged Transmembrane Displayed Fap2 Truncation pDNA Transfectants

[0075] As shown in FIG. 5, flow cytometry was used to detect surface FLAG expression in FLAG-tagged transmembrane displayed Fap2 truncation pDNA transfectants. For this example, nine different constructs were prepared as follows. To prepare the FLAG-tagged variants, a FLAG tag sequence was inserted between the signal peptide and the coding sequence of the Fap2 variant as follows: in the DNA sequence between the nucleotides at positions 63 and 64,

GACTACAAAGACGATGACGACAAGGGCGGAGGCTCT (SEQ ID NO:4558), and in the amino acid sequence between residues 21 and 22, DYKDDDDKGGGS (SEQ ID NO: 4559).
[0076] FLAG-mSb-Strep—Ig kappa signal peptide preceding an N-terminal FLAG-tagged construct bearing the mSb reporter a C-terminal Strep tag;
[0077] FLAG-mSb-PDG-Strep—Ig kappa signal peptide preceding an N-terminal FLAG-tagged construct bearing the mSb reporter with a PDGFR transmembrane anchor and a C-terminal Strep tag;
[0078] FLAG-mSb-B7-Strep—Ig kappa signal peptide preceding an N-terminal FLAG-tagged construct bearing the mSb reporter with a B7-1 transmembrane anchor and a C-terminal Strep tag;
[0079] FLAG-Fap2-T1-PDG-Strep—Ig kappa signal peptide preceding an N-terminal FLAG-tagged construct bearing the Fap2 T1 domain with a PDGFR transmembrane anchor and a C-terminal Strep tag (SEQ ID NO:24/SEQ ID NO: 59 with FLAG-tag);
[0080] FLAG-Fap2-T1-B7-Strep—Ig kappa signal peptide preceding an N-terminal FLAG-tagged construct bearing the Fap2 T1 domain with a B7-1 transmembrane anchor and a C-terminal Strep tag (SEQ ID NO: 19/SEQ ID NO: 54 with FLAG-tag);
[0081] FLAG-Fap2-T2-PDG-Strep—Ig kappa signal peptide preceding an N-terminal FLAG-tagged construct bearing the Fap2 T2 domain with a PDGFR transmembrane anchor and a C-terminal Strep tag (SEQ ID NO:31/SEQ ID NO: 66 with FLAG-tag);
[0082] FLAG-Fap2-T2-B7-Strep—Ig kappa signal peptide preceding an N-terminal FLAG-tagged construct bearing the Fap2 T2 domain with a B7-1 transmembrane anchor and a C-terminal Strep tag (SEQ ID NO:26/SEQ ID NO:61 with FLAG-tag);
[0083] FLAG-Fap2-T3-PDG-Strep—Ig kappa signal peptide preceding an N-terminal FLAG-tagged construct bearing the Fap2 T3 domain with a PDGFR transmembrane anchor and a C-terminal Strep tag (SEQ ID NO:38/SEQ ID NO: 73 with FLAG-tag);
[0084] FLAG-Fap2-T3-B7-Strep—Ig kappa signal peptide preceding an N-terminal FLAG-tagged construct bearing the Fap2 T3 domain with a B7-1 transmembrane anchor and a C-terminal Strep tag (SEQ ID NO:33/SEQ ID NO:68 with FLAG-tag);
   An unstained negative control was also evaluated.

[0085] HEK293T/17 cells were plated at 2.5ml/well (540,000 cells/ml) in 6-well plates ˜19 hours prior to transfection. Cells were transfected with 2.5 ug of plasmid DNA using TransIT-LT1. Cells were harvested for analysis at ˜24 hours following transfection. Cells were stained with FITC-conjugated anti-FLAG for 30 mins, and then stained with DAPI. Cells were analyzed on a BD Fortessa flow cytometer. Resulting events were gated to isolate singlet live cells, and FLAG-positivity was determined relative to an unstained control. All transfections were performed in duplicate. Bars represent the mean FLAG-positivity (top) or gMFI (geometric mean fluorescent intensity) (bottom), and error bars represent the standard error of the mean.

[0086] As shown in FIG. 6, flow cytometry was also used to detect expression of StrepTagII in the transmembrane displayed Fap2 truncation pDNA transfectants. The B7 transmembrane domain was selected as an exemplary representative transmembrane anchor for this example. HEK293T/17 cells were plated at 2.5 ml/well (540,000 cells/ml) in 6-well plates ˜19 hours prior to transfection. Cells were transfected with 2.5 ug of plasmid DNA using TransIT-LT1. Cells were harvested for analysis at ˜24 hours following transfection. Cells were stained with Fixable Viability Dye eFluor780 for 30 mins, fixed with 4% formaldehyde for 15 mins, permeabilized with cell permeablization buffer for 10 mins, and then stained with FITC-conjugated mouse anti-StrepTagII antibody for 30 mins. Cells were analyzed on a BD Fortessa flow cytometer. Resulting events were gated to isolate singlet live cells, and StrepTagII-positivity was determined relative to an unstained control. All transfections were performed in duplicate. Bars represent the mean StrepTagII-positivity (top) or gMFI (bottom), and error bars represent the standard error of the mean.

[0087] The reactivity of the transmembrane-displayed Fap2 truncation vaccine serum pools to Fap2-T3 was tested and compared with secreted Fap2 truncation vaccine serum pools to show that both types of construct result in the generation of Fap2-specific antibodies. As shown in FIG. 7, to examine for Fap2-specific antibodies, HEK293T/17 cells were transfected with Fap2-T3-Sec-Strep plasmid DNA using TransIT-LT1. At ˜52 hours following transfection, transfectant media was collected. Negative control (mock-transfected) media was also collected. Transfectant or negative control media was then used to coat pre-blocked streptavidin-coated 96-well plates (100 ul of media/well) after washing the plates 3× with ELISA wash buffer. Plates were incubated for 2 hours at 4 C to allow for antigen binding. Following coating, plates were washed 3× with ELISA wash buffer and 100 ul of diluted serum samples were added to wells in duplicate. Plates were incubated at 4 C overnight. Following overnight incubation, the plates were washed 3× with ELISA wash buffer, and 100 ul of HRP-conjugated donkey anti-mouse IgG antibody (1/5000 dilution) was added per well and allowed to incubate for 2 hours. Plates were washed 3× with ELISA wash buffer, and 100 ul of TMB substrate solution was added per well. Reactions were allowed to develop for ˜4 mins, then 100 ul of ELISA stop solution was added and OD450 was measured. Each serum sample was assayed in duplicate. Facets represent dilutions of serum (400-fold, 800-fold, or 1600-fold). Bars represent the mean OD450, and error bars represent the standard error of the mean.

### Example 7.0

### Reactivity of B-cell Hybridoma Media Samples to Fap2 Antigens

[0088] As shown in FIG. 8, the reactivity of B-cell hybridoma media samples to various Fap2 antigen sources was examined. Mice were vaccinated with E. coli-derived protein of the Fap2 T2 segment from F. nucleatum strain 23726 and hybridoma cell pools were created. To examine for Fap2-specific antibodies in hybridoma clone pool media samples (identified along the x-axis), plates were coated with various forms of Fap2 antigen and hybridoma pool media samples containing secreted antibodies were assayed via ELISA. The amino acid sequence of full length Fap2 from F. Nucleatum strain 23726 is provided in SEQ ID NO:4560, and the amino acid sequence of the Fap2 T2 segment from F. Nucleatum strain 23726 is provided in SEQ ID NO:4561. In this example, the Fap2 T2 segment included an N-terminal His-tag added to facilitate purification (SEQ ID NO:4562).

[0089] Top Panel: E. coli-derived protein of the Fap2 T2 segment from F. nucleatum strain 23726 was coated onto Maxisorp plates at 10 ug/ml using 100 ul/well and incubated overnight. Plates were washed 3× with ELISA wash buffer and blocked. Following blocking, plates were washed 3× with ELISA wash buffer and 50 ul of diluted hybridoma pool media samples were added to wells in duplicate. Plates were incubated at 4 C overnight. Following overnight incubation, the plates were washed 3× with ELISA wash buffer, and 100 ul of HRP-conjugated donkey anti-mouse IgG antibody (1/5000 dilution) was added per well and allowed to incubate at RT for 2 hours. Plates were washed 3× with ELISA wash buffer, and 100 ul of TMB substrate solution was added per well. Reactions were allowed to develop for ˜2.5 mins, then 100 ul of ELISA stop solution was added and OD450 was measured. Each media sample was assayed in duplicate. Bars represent the mean OD450, and error bars represent the standard error of the mean.

[0090] Middle Three Panels: HEK293T/17 cells were transfected with Fap2-T1-Sec-Strep or Fap2-T2-Sec-Strep plasmid DNA from F. nucleatum strain 7-1 using TransIT-LT1. At ˜48 hours following transfection, transfectant media was collected. Negative control (mock-transfected) media was also collected. Transfectant or negative control media was then used to coat pre-blocked streptavidin-coated 96-well plates (100 ul of media/well) after washing the plates 3× with ELISA wash buffer. Plates were incubated for 3 hours at 4 C to allow for antigen binding. Following coating, plates were washed 3× with ELISA wash buffer and 50 ul of diluted hybridoma pool media samples were added to wells in duplicate. Plates were incubated at 4 C overnight. Following overnight incubation, the plates were washed 3× with ELISA wash buffer, and 100 ul of HRP-conjugated donkey anti-mouse IgG antibody (1/5000 dilution) was added per well and allowed to incubate at RT for 2 hours. Plates were washed 3× with ELISA wash buffer, and 100 ul of TMB substrate solution was added per well. Reactions were allowed to develop for ˜2.5 mins, then 100 ul of ELISA stop solution was added and OD450 was measured. Each media sample was assayed in duplicate. Bars represent the mean OD450, and error bars represent the standard error of the mean.

[0091] Bottom panel: F. nucleatum strain 7-1 lysate (extracted using B-PER Complete Reagent) was coated onto Maxisorp plates at 10 ug/ml using 100 ul/well and incubated overnight. Plates were washed 3× with ELISA wash buffer and blocked. Following blocking, plates were washed 3× with ELISA wash buffer and 50 ul of diluted hybridoma pool media samples were added to wells in duplicate. Plates were incubated at 4 C overnight. Following overnight incubation, the plates were washed 3× with ELISA wash buffer, and 100 ul of HRP-conjugated donkey anti-mouse IgG antibody (1/5000 dilution) was added per well and allowed to incubate at RT for 2 hours. Plates were washed 3× with ELISA wash buffer, and 100 ul of TMB substrate solution was added per well. Reactions were allowed to develop for ˜20 mins, then 100 ul of ELISA stop solution was added and OD450 was measured. Each media sample was assayed in duplicate. Bars represent the mean OD450, and error bars represent the standard error of the mean.

### Example 8.0

### Prediction of Additional Possible Fap2 Epitopes

[0092] BepiPred-2.0 was used to predict B cell epitope probabilities for Fap2 from each of the nine Fusobacterium nucleatum subsp. Input for the prediction is the protein sequence, output of the prediction is a probability, per amino acid, that that amino acid is part of a B cell epitope. Different Epitope Probability thresholds can be chosen, with different associated sensitivity and specificity. The inventors used three approaches to identify regions of increased epitope density and specific predicted epitopes.

[0093] As shown in FIG. 9, first, for F. nucleatum 7-1, the inventors mapped the per-amino-acid Epitope Probability scores to a gradient to display on the predicted Fap2 structure. This shows the main body of Fap2 having the highest Epitope Probability scores.

[0094] Next, as shown in FIG. 10, the inventors displayed the per-amino-acid Epitope Probability for each F. nucleatum subsp. in a plot. A horizontal dashed line is drawn at 0.6, which corresponds to a specificity of 95% and a sensitivity of 10%. Vertical dotted lines are drawn at the different truncation boundaries, and this shows how the truncations T1, T2, T3 and T4 tested above were selected to contain the regions with the highest probability of harbouring B cell epitopes.

[0095] The final approach was to start with an Epitope Probability threshold of 1.00, and slowly decrease this until the amino acids that fall above the threshold represent at least 10 contiguous linear epitopes that are 12aa long. The threshold was selected independently for each F. nucleatum subsp., though ended up being 0.68 for each. Table 3 summarizes the F. nucleatum subsp. that was the source of the Fap2 sequence, the threshold (the Epitope Probability threshold that was used), the epitope (the 12aa linear B cell epitope), and the starting position of the epitope (the position of the Fap2 reference protein where the epitope is found). Additionally, the inventors determined for each position along the predicted epitope the per-amino-acid Epitope Probabilities (data not shown).

TABLE 3
B-Cell Epitope Predictions for Various F. nucleatum subsp.

| F. nucleatum | | | Start | |
|---|---|---|---|---|
| subsp. | Threshold | Epitope | Pos. | SEQ ID NO: |
| Fn7/1 (i.e. | 0.68 | SLNSWKNANNSS | 173 | SEQ ID NO: 127 |
| F. nucleatum | | | | |
| 7/1) | | | | |
| Fn7/1 | 0.68 | LNSWKNANNSSN | 174 | SEQ ID NO: 128 |
| Fn7/1 | 0.68 | ETDTLINGSGAR | 718 | SEQ ID NO: 129 |
| Fn7/1 | 0.68 | TDTLINGSGARN | 719 | SEQ ID NO: 130 |
| Fn7/1 | 0.68 | DTLINGSGARNT | 720 | SEQ ID NO: 131 |
| Fn7/1 | 0.68 | TLINGSGARNTA | 721 | SEQ ID NO: 132 |
| Fn7/1 | 0.68 | LINGSGARNTAT | 722 | SEQ ID NO: 133 |
| Fn7/1 | 0.68 | KSSQANIESVVT | 1544 | SEQ ID NO: 134 |
| Fn7/1 | 0.68 | EESAGMYVENSS | 1772 | SEQ ID NO: 135 |
| Fn7/1 | 0.68 | ESAGMYVENSSA | 1773 | SEQ ID NO: 136 |
| Fn7/1 | 0.68 | SAGMYVENSSAT | 1774 | SEQ ID NO: 137 |
| Fn7/1 | 0.68 | AGMYVENSSATN | 1775 | SEQ ID NO: 138 |
| Fn7/1 | 0.68 | GMYVENSSATNK | 1776 | SEQ ID NO: 139 |
| Fn7/1 | 0.68 | MYVENSSATNKK | 1777 | SEQ ID NO: 140 |
| Fn7/1 | 0.68 | QKQINSKISSDP | 3266 | SEQ ID NO: 141 |
| ATCC23726 | 0.68 | DTLINSSGARNT | 715 | SEQ ID NO: 142 |
| ATCC23726 | 0.68 | TLINSSGARNTA | 716 | SEQ ID NO: 143 |
| ATCC23726 | 0.68 | LINSSGARNTAT | 717 | SEQ ID NO: 144 |
| ATCC23726 | 0.68 | NESTQANTQSEV | 1308 | SEQ ID NO: 145 |
| ATCC23726 | 0.68 | ESTQANTQSEVT | 1309 | SEQ ID NO: 146 |
| ATCC23726 | 0.68 | STQANTQSEVTN | 1310 | SEQ ID NO: 147 |
| ATCC23726 | 0.68 | TQANTQSEVTNS | 1311 | SEQ ID NO: 148 |
| ATCC23726 | 0.68 | EESVGMYSSSSL | 1715 | SEQ ID NO: 149 |
| ATCC23726 | 0.68 | ESVGMYSSSSLK | 1716 | SEQ ID NO: 150 |
| ATCC23726 | 0.68 | SVGMYSSSSLKA | 1717 | SEQ ID NO: 151 |
| ATCC23726 | 0.68 | TLDKNTSKLDYT | 2204 | SEQ ID NO: 152 |
| ATCC23726 | 0.68 | LDKNTSKLDYTL | 2205 | SEQ ID NO: 153 |
| ATCC23726 | 0.68 | DKNTSKLDYTLQ | 2206 | SEQ ID NO: 154 |
| ATCC23726 | 0.68 | KNTSKLDYTLQG | 2207 | SEQ ID NO: 155 |
| ATCC23726 | 0.68 | NTSKLDYTLQGT | 2208 | SEQ ID NO: 156 |
| ATCC23726 | 0.68 | TSKLDYTLQGTG | 2209 | SEQ ID NO: 157 |
| ATCC23726 | 0.68 | ENKGGQITSESG | 2559 | SEQ ID NO: 158 |
| ChDC-F317 | 0.68 | KEEESVGMYSSS | 1712 | SEQ ID NO: 159 |
| ChDC-F317 | 0.68 | EEESVGMYSSSS | 1713 | SEQ ID NO: 160 |
| ChDC-F317 | 0.68 | KLELETTSNSKI | 2529 | SEQ ID NO: 161 |
| ChDC-F317 | 0.68 | LELETTSNSKIS | 2530 | SEQ ID NO: 162 |
| ChDC-F317 | 0.68 | ELETTSNSKISL | 2531 | SEQ ID NO: 163 |
| ChDC-F317 | 0.68 | LETTSNSKISLG | 2532 | SEQ ID NO: 164 |
| ChDC-F317 | 0.68 | IENKGGQITSES | 2557 | SEQ ID NO: 165 |
| ChDC-F317 | 0.68 | ENKGGQITSESG | 2558 | SEQ ID NO: 166 |
| ChDC-F317 | 0.68 | NKGGQITSESGA | 2559 | SEQ ID NO: 167 |
| ChDC-F317 | 0.68 | KGGQITSESGAT | 2560 | SEQ ID NO: 168 |
| ChDC-F317 | 0.68 | INLGNGSVGLYS | 2601 | SEQ ID NO: 169 |
| ChDC-F317 | 0.68 | NLGNGSVGLYSK | 2602 | SEQ ID NO: 170 |
| ChDC-F317 | 0.68 | LGNGSVGLYSKG | 2603 | SEQ ID NO: 171 |
| ChDC-F317 | 0.68 | GNGSVGLYSKGQ | 2604 | SEQ ID NO: 172 |
| ChDC-F317 | 0.68 | NGSVGLYSKGQS | 2605 | SEQ ID NO: 173 |
| ChDC-F317 | 0.68 | GSVGLYSKGQSN | 2606 | SEQ ID NO: 174 |
| ChDC-F317 | 0.68 | SVGLYSKGQSNT | 2607 | SEQ ID NO: 175 |
| Fn3-1-27 | 0.68 | NTSDKGNTNLDG | 934 | SEQ ID NO: 176 |
| Fn3-1-27 | 0.68 | TSDKGNTNLDGN | 935 | SEQ ID NO: 177 |
| Fn3-1-27 | 0.68 | NESNQANTQSEV | 1318 | SEQ ID NO: 178 |
| Fn3-1-27 | 0.68 | ESNQANTQSEVT | 1319 | SEQ ID NO: 179 |
| Fn3-1-27 | 0.68 | ESTAVGKGNVSA | 1872 | SEQ ID NO: 180 |
| Fn3-1-27 | 0.68 | STAVGKGNVSAE | 1873 | SEQ ID NO: 181 |
| Fn3-1-27 | 0.68 | IENKGGQITSES | 2566 | SEQ ID NO: 182 |
| Fn3-1-27 | 0.68 | ENKGGQITSESG | 2567 | SEQ ID NO: 183 |
| Fn3-1-27 | 0.68 | NKGGQITSESGA | 2568 | SEQ ID NO: 184 |
| Fn3-1-27 | 0.68 | KGGQITSESGAT | 2569 | SEQ ID NO: 185 |
| Fn3-1-36A2 | 0.68 | SVVNQETGISNL | 678 | SEQ ID NO: 186 |
| Fn3-1-36A2 | 0.68 | VVNQETGISNLP | 679 | SEQ ID NO: 187 |
| Fn3-1-36A2 | 0.68 | VNQETGISNLPN | 680 | SEQ ID NO: 188 |
| Fn3-1-36A2 | 0.68 | NQETGISNLPNA | 681 | SEQ ID NO: 189 |
| Fn3-1-36A2 | 0.68 | VNTSDKGNTNLD | 933 | SEQ ID NO: 190 |
| Fn3-1-36A2 | 0.68 | NTSDKGNTNLDG | 934 | SEQ ID NO: 191 |
| Fn3-1-36A2 | 0.68 | NESNQANTQSEV | 1318 | SEQ ID NO: 192 |
| Fn3-1-36A2 | 0.68 | ESNQANTQSEVT | 1319 | SEQ ID NO: 193 |
| Fn3-1-36A2 | 0.68 | SNQANTQSEVTN | 1320 | SEQ ID NO: 194 |
| Fn3-1-36A2 | 0.68 | IENKGGQITSES | 2566 | SEQ ID NO: 195 |
| Fn3-1-36A2 | 0.68 | ENKGGQITSESG | 2567 | SEQ ID NO: 196 |
| Fn3-1-36A2 | 0.68 | VGLYSKGQSYTI | 2617 | SEQ ID NO: 197 |
| Fn3-1-36A2 | 0.68 | GLYSKGQSYTIR | 2618 | SEQ ID NO: 198 |
| Fn3-1-36A2 | 0.68 | LYSKGQSYTIRN | 2619 | SEQ ID NO: 199 |
| Fn3-1-36A2 | 0.68 | KQINDKISSDPE | 3262 | SEQ ID NO: 200 |
| Fn3-1-36A2 | 0.68 | QINDKISSDPEG | 3263 | SEQ ID NO: 201 |
| Fn3-1-36A2 | 0.68 | INDKISSDPEGQ | 3264 | SEQ ID NO: 202 |
| Fn3-1-36A2 | 0.68 | NDKISSDPEGQA | 3265 | SEQ ID NO: 203 |
| Fn3-1-36A2 | 0.68 | DKISSDPEGQAL | 3266 | SEQ ID NO: 204 |
| Fn4-8 | 0.68 | KNASSQANTQSD | 1538 | SEQ ID NO: 205 |
| Fn4-8 | 0.68 | NASSQANTQSDV | 1539 | SEQ ID NO: 206 |
| Fn4-8 | 0.68 | ASSQANTQSDVT | 1540 | SEQ ID NO: 207 |
| Fn4-8 | 0.68 | SSQANTQSDVTN | 1541 | SEQ ID NO: 208 |
| Fn4-8 | 0.68 | SQANTQSDVINS | 1542 | SEQ ID NO: 209 |
| Fn4-8 | 0.68 | VENDNSITTKEE | 1756 | SEQ ID NO: 210 |
| Fn4-8 | 0.68 | ENDNSITTKEET | 1757 | SEQ ID NO: 211 |
| Fn4-8 | 0.68 | NDNSITTKEETS | 1758 | SEQ ID NO: 212 |
| Fn4-8 | 0.68 | DNSITTKEETSA | 1759 | SEQ ID NO: 213 |
| Fn4-8 | 0.68 | NSITTKEETSAG | 1760 | SEQ ID NO: 214 |
| Fn4-8 | 0.68 | SITTKEETSAGM | 1761 | SEQ ID NO: 215 |
| Fn4-8 | 0.68 | ITTKEETSAGMY | 1762 | SEQ ID NO: 216 |
| Fn4-8 | 0.68 | TTKEETSAGMYV | 1763 | SEQ ID NO: 217 |
| Fn4-8 | 0.68 | TKEETSAGMYVK | 1764 | SEQ ID NO: 218 |
| Fn4-8 | 0.68 | KEETSAGMYVKN | 1765 | SEQ ID NO: 219 |
| Fn4-8 | 0.68 | EETSAGMYVKNG | 1766 | SEQ ID NO: 220 |
| Fn4-8 | 0.68 | ETSAGMYVKNGN | 1767 | SEQ ID NO: 221 |
| Fn4-8 | 0.68 | ESTAVGKGNVSA | 1867 | SEQ ID NO: 222 |
| Fn4-8 | 0.68 | LKDSTVSNGSSA | 2132 | SEQ ID NO: 223 |
| Fn4-8 | 0.68 | KDSTVSNGSSAV | 2133 | SEQ ID NO: 224 |
| Fn4-8 | 0.68 | ENKGGQITSESG | 2563 | SEQ ID NO: 225 |
| Fn4-8 | 0.68 | NKGGQITSESGA | 2564 | SEQ ID NO: 226 |
| Fn4-8 | 0.68 | KGGQITSESGAT | 2565 | SEQ ID NO: 227 |
| Fn4-8 | 0.68 | SVGLYSKGQSYT | 2611 | SEQ ID NO: 228 |
| Fn4-8 | 0.68 | VGLYSKGQSYTV | 2612 | SEQ ID NO: 229 |
| Fn4-8 | 0.68 | GLYSKGQSYTVR | 2613 | SEQ ID NO: 230 |
| Fn4-8 | 0.68 | LYSKGQSYTVRN | 2614 | SEQ ID NO: 231 |
| Fn4-8 | 0.68 | YSKGQSYTVRNS | 2615 | SEQ ID NO: 232 |
| Fn4-8 | 0.68 | SKGQSYTVRNSV | 2616 | SEQ ID NO: 233 |
| Fn4-8 | 0.68 | KGQSYTVRNSVT | 2617 | SEQ ID NO: 234 |
| Fn4-8 | 0.68 | VNKTNIYNNTNT | 2975 | SEQ ID NO: 235 |
| Fn4-8 | 0.68 | NKTNIYNNTNTG | 2976 | SEQ ID NO: 236 |
| KCOM-1322 | 0.68 | KEEESVGMYSSS | 1712 | SEQ ID NO: 237 |
| KCOM-1322 | 0.68 | EEESVGMYSSSS | 1713 | SEQ ID NO: 238 |
| KCOM-1322 | 0.68 | KLELETTSNSKI | 2529 | SEQ ID NO: 239 |
| KCOM-1322 | 0.68 | LELETTSNSKIS | 2530 | SEQ ID NO: 240 |
| KCOM-1322 | 0.68 | ELETTSNSKISL | 2531 | SEQ ID NO: 241 |
| KCOM-1322 | 0.68 | LETTSNSKISLG | 2532 | SEQ ID NO: 242 |
| KCOM-1322 | 0.68 | IENKGGQITSES | 2557 | SEQ ID NO: 243 |
| KCOM-1322 | 0.68 | ENKGGQITSESG | 2558 | SEQ ID NO: 244 |
| KCOM-1322 | 0.68 | NKGGQITSESGA | 2559 | SEQ ID NO: 245 |
| KCOM-1322 | 0.68 | KGGQITSESGAT | 2560 | SEQ ID NO: 246 |
| KCOM-1322 | 0.68 | INLGNGSVGLYS | 2601 | SEQ ID NO: 247 |
| KCOM-1322 | 0.68 | NLGNGSVGLYSK | 2602 | SEQ ID NO: 248 |
| KCOM-1322 | 0.68 | LGNGSVGLYSKG | 2603 | SEQ ID NO: 249 |
| KCOM-1322 | 0.68 | GNGSVGLYSKGQ | 2604 | SEQ ID NO: 250 |
| KCOM-1322 | 0.68 | NGSVGLYSKGQS | 2605 | SEQ ID NO: 251 |
| KCOM-1322 | 0.68 | GSVGLYSKGQSN | 2606 | SEQ ID NO: 252 |
| KCOM-1322 | 0.68 | SVGLYSKGQSNT | 2607 | SEQ ID NO: 253 |
| KCOM-2931 | 0.68 | VVNQETGISNLP | 679 | SEQ ID NO: 254 |
| KCOM-2931 | 0.68 | VNQETGISNLPN | 680 | SEQ ID NO: 255 |
| KCOM-2931 | 0.68 | LNKGQLTENGVN | 771 | SEQ ID NO: 256 |
| KCOM-2931 | 0.68 | NKGQLTENGVNK | 772 | SEQ ID NO: 257 |
| KCOM-2931 | 0.68 | KGQLTENGVNKG | 773 | SEQ ID NO: 258 |
| KCOM-2931 | 0.68 | GQLTENGVNKGS | 774 | SEQ ID NO: 259 |
| KCOM-2931 | 0.68 | NESNQANTQSEV | 1318 | SEQ ID NO: 260 |
| KCOM-2931 | 0.68 | ESNQANTQSEVT | 1319 | SEQ ID NO: 261 |
| KCOM-2931 | 0.68 | SEVVNSERISLA | 1378 | SEQ ID NO: 262 |
| KCOM-2931 | 0.68 | EVVNSERISLAN | 1379 | SEQ ID NO: 263 |
| KCOM-2931 | 0.68 | VVNSERISLANN | 1380 | SEQ ID NO: 264 |
| KCOM-2931 | 0.68 | VNSERISLANNS | 1381 | SEQ ID NO: 265 |
| KCOM-2931 | 0.68 | NSERISLANNSI | 1382 | SEQ ID NO: 266 |
| KCOM-2931 | 0.68 | SERISLANNSIS | 1383 | SEQ ID NO: 267 |
| KCOM-2931 | 0.68 | ERISLANNSIST | 1384 | SEQ ID NO: 268 |
| KCOM-2931 | 0.68 | RISLANNSISTS | 1385 | SEQ ID NO: 269 |
| KCOM-2931 | 0.68 | ISLANNSISTSS | 1386 | SEQ ID NO: 270 |
| KCOM-2931 | 0.68 | SLANNSISTSSD | 1387 | SEQ ID NO: 271 |
| KCOM-2931 | 0.68 | IENKGGQITSES | 2566 | SEQ ID NO: 272 |
| KCOM-2931 | 0.68 | ENKGGQITSESG | 2567 | SEQ ID NO: 273 |
| KCOM-2931 | 0.68 | NKGGQITSESGA | 2568 | SEQ ID NO: 274 |
| KCOM-2931 | 0.68 | KGGQITSESGAT | 2569 | SEQ ID NO: 275 |
| MGYG-HGUT-01347 | 0.68 | SVVNQETGISNL | 678 | SEQ ID NO: 276 |
| MGYG-HGUT-01347 | 0.68 | VVNQETGISNLP | 679 | SEQ ID NO: 277 |
| MGYG-HGUT-01347 | 0.68 | VNQETGISNLPN | 680 | SEQ ID NO: 278 |
| MGYG-HGUT-01347 | 0.68 | NQETGISNLPNA | 681 | SEQ ID NO: 279 |
| MGYG-HGUT-01347 | 0.68 | VNTSDKGNTNLD | 933 | SEQ ID NO: 280 |
| MGYG-HGUT-01347 | 0.68 | NTSDKGNTNLDG | 934 | SEQ ID NO: 281 |
| MGYG-HGUT-01347 | 0.68 | NESNQANTQSEV | 1318 | SEQ ID NO: 282 |
| MGYG-HGUT-01347 | 0.68 | ESNQANTQSEVT | 1319 | SEQ ID NO: 283 |
| MGYG-HGUT-01347 | 0.68 | SNQANTQSEVTN | 1320 | SEQ ID NO: 284 |
| MGYG-HGUT-01347 | 0.68 | IENKGGQITSES | 2566 | SEQ ID NO: 285 |
| MGYG-HGUT-01347 | 0.68 | ENKGGQITSESG | 2567 | SEQ ID NO: 286 |
| MGYG-HGUT-01347 | 0.68 | VGLYSKGQSYTI | 2617 | SEQ ID NO: 287 |
| MGYG-HGUT-01347 | 0.68 | GLYSKGQSYTIR | 2618 | SEQ ID NO: 288 |
| MGYG-HGUT-01347 | 0.68 | LYSKGQSYTIRN | 2619 | SEQ ID NO: 289 |
| MGYG-HGUT-01347 | 0.68 | KQINDKISSDPE | 3262 | SEQ ID NO: 290 |
| MGYG-HGUT-01347 | 0.68 | QINDKISSDPEG | 3263 | SEQ ID NO: 291 |
| MGYG-HGUT-01347 | 0.68 | INDKISSDPEGQ | 3264 | SEQ ID NO: 292 |
| MGYG-HGUT-01347 | 0.68 | NDKISSDPEGQA | 3265 | SEQ ID NO: 293 |
| MGYG-HGUT-01347 | 0.68 | DKISSDPEGQAL | 3266 | SEQ ID NO: 294 |

[0096] To predict T cell epitopes, NetMHCpan 4.1 was used predict binding of all 8-11mer peptides derived from the nine F. nucleatum subsp. Fap2 reference sequences to all available human MHC (coded by HLA genes; n=2915). Peptide-MHC pairs with predicted IC50 values <500 nM were classified as binders. Each unique predicted binding peptide is shown in SEQ ID NOs: 317-4557, and a list of the F. nucleatum subsp. that contain that peptide in their Fap2 protein, and the list of HLA that are predicted to present that peptide is provided in U.S. provisional patent application No. 63/384,320 filed 18 Nov. 2022, the entirety of which is incorporated by reference herein.

### Example 9.0

### Preparation of Monoclonal Antibodies Directed Against Fap2

[0097] The inventors have obtained splenocytes from mice vaccinated with Fap2 antigens. Such splenocytes can be used as a source for the derivation of monoclonal antibodies directed against Fap2.

[0098] While a number of exemplary aspects and embodiments have been discussed above, those of skill in the art will recognize certain modifications, permutations, additions and sub-combinations thereof. It is therefore intended that the following appended claims and claims hereafter introduced are interpreted to include all such modifications, permutations, additions and sub-combinations as are consistent with the broadest interpretation of the specification as a whole.

### REFERENCES

[0099] The following references are of interest with respect to the subject matter described herein. Each of the following references is incorporated by reference in its entirety herein.
[0100] 1. Bolstad, A., Jensen, H., and Bakken, V. 1996. Taxonomy, biology, and periodontal aspects of Fusobacterium nucleatum. Clin. Microbiol. Rev. 9:55-71.
[0101] 2. Parhi, L., Abed, J., Shhadeh, A., Alon-Maimon, T., Udi, S., Ben-Arye, S.L., Tam, J., Parnas, O., Padler-Karavani, V., Goldman-Wohl, D., Yagel, S., Mandelboim, O., and Bachrach, G. 2022. Placental colonization by Fusobacterium nucleatum is mediated by binding of the Fap2 lectin to placentally displayed Gal-GalNAc. Cell Reports. 38 (12): 110537
[0102] 3. Han, X., Weinberg, J., Prabhu, S., Hassenbusch, S., Fuller, G., and Tarrand, J. 2003. Fusobacterial brain abscess: a review of five cases and an analysis of possible pathogenesis. J. Neurosurg. 99:693-700.
[0103] 4. Han, Y. W. 2015. Fusobacterium nucleatum: a commensal-turned pathogen. Curr. Opin. Microbiol. 23:141-147.
[0104] 5. He Z, Tian W, Wei Q and Xu J. 2022. Involvement of Fusobacterium nucleatum in malignancies except for colorectal cancer: A literature review. Front. Immunol. 13:968649. doi: 10.3389/fimmu.2022.968649
[0105] 6. Herrera L A et al. Role of infectious diseases in human carcinogenesis. Environmental & Molecular Mutagenesis. 2005; 45 (284-303)).
[0106] 7. Kai, A., Cooke, F., Antoun, N., Siddharthan, C., and Sule, O. 2008. A rare presentation of ventriculitis and brain abscess caused by Fusobacterium nucleatum. J. Med. Microbiol. 57:668-671.
[0107] 8. Krisanaprakornkit, S. and Dale, D. 2000. Inducible expression of human beta-defensin 2 by Fusobacterium nucleatum in oral epithelial cells: Multiple signaling pathways and role of commensal bacteria in innate immunity and the epithelial barrier. Infect. Immun. 68:2907-2915.
[0108] 9. McLean M H, Murray G I, Stewart K N, Norrie G, Mayer C, Hold G L, Thomson J, Fyfe N, Hope M, Mowat N A et al. 2011. The Inflammatory Microenvironment in Colorectal Neoplasia. PLOS One 6: e15366.
[0109] 10. Parkin, D. 2006. The global health burden of infection-associated cancers in the year 2002. Int. J. Cancer 118:3030-3044.
[0110] 11. Peyret-Lacombe, A., Brunel, G., Watts, M., Charveron, M., and Duplan, H. 2009. TLR2 sensing of F. nucleatum and S. sanguinis distinctly triggered gingival innate response. Cytokine 46:201-210.
[0111] 12. Serna, G. et al. 2020. Fusobacterium nucleatum persistence and risk of recurrence after preoperative treatment in locally advanced rectal cancer. Annals of Oncology 31 (10): 1366-1375.
[0112] 13. Signat, B. and Duffaut, D. 2011. Role of Fusobacterium nucleatum in Periodontal Health and Disease. Curr. Issues Mol. Biol. 13:25-35.
[0113] 14. Strauss, J., Kaplan, G. G., Beck, P. L., Rioux, K., Panaccione, R., DeVinney, R., Lynch, T., and Allen-Vercoe, E. 2011. Invasive potential of gut mucosa-derived Fusobacterium nucleatum positively correlates with IBD status of the host. Inflammatory Bowel Diseases. Advance online Publication.
[0114] 15. Strauss, J., White, A., Ambrose, C., McDonald, J., and Allen-Vercoe, E. 2008. Phenotypic and genotypic analyses of clinical Fusobacterium nucleatum and Fusobacterium periodonticum isolates from the human gut. Anaerobe 14:301-309.
[0115] 16. Swidsinski, A. and Ismail, M. 2011. Acute appendicitis is characterised by local invasion with Fusobacterium nucleatum/necrophorum. Gut 60:34-40.
[0116] 17. Vogelstein, B. and Leppert, M. 19PCT88. Genetic alterations during colorectal-tumour development. N. Engl. J. Med. 319:525-532.
[0117] 18. Weeks, D. F., Katz, D. S., Saxon, P. and Kubal, W. S. Lemierre syndrome: report of five new cases and literature review. 2010 Emerg. Radiol. 17:323-328.
[0118] 19. Weiss, E. and Metzger, Z. 2000. Attachment of Fusobacterium nucleatum PK1594 to mammalian cells and its coaggregation with periodontopathogenic bacteria are mediated by the same galactose-binding adhesin. Oral Microbiol. Immunol. 15:371-377.
[0119] 20. Wu S, Rhee K J, Albesiano E, Rabizadeh S, Wu X, Yen H R, Huso D L, Brancati FL, Wick E, McAllister F et al. 2009. A human colonic commensal promotes colon tumourigenesis via activation of T helper type 17 T cell responses. Nat Med 15:1016-1022.
[0120] 21. Ximenez-Fyvie, L. and Socransky, S. 2000. Comparison of the microbiota of supra-and subgingival plaque in health and periodontitis. J. Clin. Periodontol. 27:648-657.
[0121] 22. Yu, T. et al. 2017. Fusobacterium nucleatum promotes chemoresistance to colorectal cancer by modulating autophagy. Cell 170:548-563.

1. A target antigen comprising a Fap2 antigen, wherein the Fap2 antigen comprises a Fap2 passenger domain from Fusobacterium spp. or an antigenic fragment thereof.

2. The target antigen as defined in claim 1, comprising between 8 and 3500 contiguous amino acid residues of the extracellular passenger domain of Fap2.

3. The target antigen as defined in claim 1, comprising:
between 8 and 546 contiguous amino acid residues of the extracellular passenger domain of Fap2 extending between positions 1081 and 1627 of the reference Fap2 protein sequence from F. nucleatum 7/1; or
between 12 and 1256 contiguous amino acid residues of the extracellular passenger domain of Fap2 extending between positions 371 and 1627 of the reference Fap2 protein sequence from F. nucleatum 7/1.

4. The target antigen as defined in claim 1 having the amino acid sequence of any one of the FL, T1, T2, T3 or T4 constructs corresponding respectively to amino acid residues 22-3474, 22-350, 22-1059, 22-1606 or 22-2252 of SEQ ID NO: 1.

5. The target antigen as defined in claim 1, having the amino acid sequence of any one of FLΔT4, FLΔT3, FLΔT2 or FLΔT1, T4ΔT3, T4ΔT2, T4ΔT1, T3ΔT2, T3ΔT1 or T2ΔT1 corresponding respectively to amino acid residues 2253-3474, 1607-3474, 1060-3474, 351-3474, 1607-2252, 1060-2252, 351-2252, 1060-1606, 351-1606 or 351-1059 of SEQ ID NO:1.

6. The target antigen as defined in claim 1 that is a B-cell epitope, optionally wherein the B-cell epitope has the amino acid sequence of one of SEQ ID NOs: 127-294.

7. The target antigen as defined in claim 1 that is a T-cell epitope, optionally wherein the T-cell epitope has the amino acid sequence of one of SEQ ID NOs: 317-4557.

8. The target antigen as defined in claim 1, further comprising an N-terminal secretion signal.

9. The target antigen as defined in claim 8, wherein the N-terminal secretion signal comprises chymotrypsinogen, trypsinogen-2, interleukin-2, serum albumin preproprotein, immunoglobulin heavy chain, immunoglobulin light chain, azurocidin preproprotein, cystatin-S precursor, Ig kappa light chain precursor (mutant A2), oncostatin-M, glycoprotein G, Ig kappa chain V-III, Ig heavy chain V, SPARC, secrecon, Ig kappa chain V-I, myeloid cell surface antigen CD33, tissue-type plasminogen activator, gaussia luciferase, influenza haemagglutinin, insulin, or silkworm fibroin light chain.

10. The target antigen as defined in either claim 8, wherein the N-terminal secretion signal comprises one of SEQ ID NOs: 295-316.

11. The target antigen as defined in claim 8, wherein the N-terminal secretion signal comprises an Ig kappa signal peptide.

12. The target antigen as defined in claim 1, further comprising a transmembrane domain.

13. The target antigen as defined in claim 1, further comprising a C-terminal multimerization domain.

14. The target antigen as defined in claim 13, wherein the C-terminal multimerization domain comprises a self-assembling domain.

15. The target antigen as defined in claim 12, wherein the transmembrane domain or the self-assembling domain comprises IMX313, T3 (10), O3 (33), Nsp10, Lumazine Synthase, M1 VLP, I3 (01), I52 (32), I53 (50), I32 (28), HbsAg VLP, PDGFR, B7-1, CD28, CD8, CD86, FasL, IgM, Foldon, Ferritin, E2p, mi3, or AP205.

16. The target antigen as defined in claim 12, wherein the transmembrane domain comprises a transmembrane anchor derived from PDGFR or B7-1; or wherein the self-assembling domain comprises Foldon, Ferritin, E2p, mi3, AP205 or IMX313.

17. The target antigen as defined in claim 1 comprising the amino acid sequence of any one of SEQ ID NOs: 1-5, 46-80, 97-112, 120-126 or 4560-4562.

18. The target antigen as defined in claim 1 consisting of an isolated polypeptide having the amino acid sequence of any one of:
constructs FL, T1, T2, T3 or T4 corresponding respectively to amino acid residues 22-3474, 22-350, 22-1059, 22-1606 or 22-2252 of SEQ ID NO:1;
constructs FLΔT4, FLΔT3, FLΔT2 or FLΔT1, T4ΔT3, T4ΔT2, T4ΔT1, T3ΔT2, T3ΔT1 or T2ΔT1 corresponding respectively to amino acid residues 2253-3474, 1607-3474, 1060-3474, 351-3474, 1607-2252, 1060-2252, 351-2252, 1060-1606, 351-1606 or 351-1059 of SEQ ID NO: 1;
between 8 and 3500 contiguous amino acid residues of the extracellular passenger domain of Fap2;
between 8 and 546 contiguous amino acid residues the extracellular passenger domain of Fap2 extending between positions 1081 and 1627 of the reference Fap2 protein sequence from F. nucleatum 7/1; or
between 8 and 1256 contiguous amino acid residues of the extracellular passenger domain of Fap2 extending between positions 371 and 1627 of the reference Fap2 protein sequence from F. nucleatum 7/1;
SEQ ID NOs: 127-294; or
SEQ ID NOs: 317-4557.

19. The target antigen as defined in claim 1, wherein the target antigen has along its length an amino acid sequence having at least 90% sequence identity, and up to 100% sequence identity, to a corresponding portion of SEQ ID NO:1.

20. An isolated nucleic acid molecule comprising a sequence encoding the target antigen as defined in claim 1.

21. An isolated nucleic acid molecule consisting of a sequence encoding the target antigen as defined in claim 1.

22. The isolated nucleic acid molecule as defined in claim 20, wherein the nucleic acid comprises DNA or mRNA.

23. The isolated nucleic acid molecule as defined in claim 20 comprising or consisting of the nucleotide sequence of any one of SEQ ID NOs: 6-10, 11-45, 81-96, or 113-119.

24. A vaccine comprising the target antigen as defined in claim 1.

25. A vaccine comprising a nucleotide construct encoding the target antigen as defined in claim 1, wherein the nucleotide construct optionally comprises DNA or mRNA.

26. The vaccine as defined in claim 25, wherein the nucleotide construct is mRNA, and wherein the mRNA is formulated in a lipid nanoparticle.

27. The vaccine as defined in claim 24 comprising a viral vector vaccine or a DNA plasmid vaccine.

28. An antibody targeting the target antigen as defined in claim 1.

29. An antibody produced using the target antigen as defined in claim 1.

30. Use of the target antigen, the nucleic acid molecule, the vaccine or the antibody as defined in claim 1 to induce an immunological response against Fusobacterium spp. in a subject.

31. The use as defined in claim 30 to prevent or treat a cancer.

32. A method of inducing an immunological response against Fusobacterium spp. in a subject, the method comprising administering the target antigen, the nucleic acid molecule, the vaccine or the antibody as defined in claim 1 to the subject.

33. A method of preventing or treating a cancer in a subject, the method comprising administering the target antigen, the nucleic acid molecule, the vaccine or the antibody as defined in claim 1 to a subject.

34. The use or method as defined in claim 30 for preventing or mitigating chemoresistance of Fusobacterium ssp. positive cancers.

35. The use or method as defined in claim 30 for preventing re-colonization of a cancer with Fusobacterium ssp.

36. The use or method as defined in claim 30 for extending cancer remission in a patient that has received treatment for the cancer.

37. The use or method as defined in claim 30 for preventing metastatic spread of localized cancer by Fusobacterium ssp.

38. A method of treating cancer in a subject, the method comprising:
administering a cancer therapy to the patient; and
concurrently with or after administering the cancer therapy, administering the target antigen, the nucleic acid molecule, the vaccine or the antibody as defined in claim 1 to the subject.

39. The method as defined in claim 38, wherein the target antigen, the nucleic acid molecule, the vaccine or the antibody is provided as an adjuvant therapy or as a neo-adjuvant therapy for the cancer therapy.

40. The use or method as defined in claim 31, wherein the cancer is colorectal cancer (CRC), oral squamous cell carcinoma, oral/head or neck cancer, head and neck squamous cell carcinoma, esophageal cancer, esophageal squamous cell carcinoma, human papillomavirus positive oropharyngeal squamous cell carcinoma, gastric cardia adenocarcinoma, gastric cancer, Helicobacter pylori-positive gastric cancer, pancreatic cancer, stomach cancer, breast cancer, bladder cancer, cervical cancer, laryngeal squamous cell carcinoma, lung cancer, biliary tract cancer, or melanoma.

41. The use or method as defined in claim 31, wherein the cancer is a gastrointestinal cancer.

42. The use or method as defined in claim 41, wherein the gastrointestinal cancer is colorectal cancer.

43. The use or method as defined in claim 30 to prevent adverse pregnancy outcomes.

44. The use or method as defined in claim 43 wherein the adverse pregnancy outcomes are pre-term birth or miscarriages.

45. The use or method as defined in claim 43, wherein the adverse pregnancy outcomes are chorioamnionitis, neonatal sepsis, or preeclampsia.

46. The use or method as defined in claim 30 to prevent or treat a dental disease.

47. The use or method as defined in claim 46 wherein the dental disease is periodontitis.

48. The use or method as defined in claim 30 to prevent or treat an autoimmune disease.

49. The use or method as defined in claim 48 wherein the autoimmune disease is irritable bowel syndrome, atherosclerotic disease or rheumatoid arthritis.

50. The use or method as defined in claim 30 to prevent or treat a condition caused by or related to infection by Fusobacterium spp.

51. The use or method as defined in claim 50 wherein the condition caused by or related to direct infection by Fusobacterium spp. is appendicitis, sepsis or tissue abscesses.

52. The use or method as defined in claim 30 comprising, prior to or concurrently with administering the target antigen, the nucleic acid molecule, the vaccine or the antibody as defined in any one of the preceding claims, administering to the subject an antibiotic to treat or reduce an infection and/or colonization of Fusobacterium spp. in the subject, wherein the antibiotic optionally comprises metronidazole.

53. The use or method as defined in claim 30, wherein the immunological response comprises any one of inducing production of Fap2-specific neutralizing antibodies, or evoking a CD8+ T cell response to target Fusobacterium spp. invaded host cells.

54. A method of preventing immunosuppression by Fusobacterium spp. mediated by Fap2 blockade of T cell immunoreceptors with Ig and ITIM domains (TIGIT) in a subject, the method comprising administering to the subject the target antigen, the nucleic acid molecule, the vaccine or the antibody as defined in claim 1.

55. A method of disrupting an interaction between Fap2 of Fusobacterium spp. and a GalGal-NAc within a mammalian subject, the method comprising administering to the subject the target antigen, the nucleic acid molecule, the vaccine or the antibody as defined in claim 1.

56. The use or method as defined in claim 30, wherein the Fusobacterium spp. is F. nucleatum.

57. The use or method as defined in claim 30, wherein the Fusobacterium spp. is F. nucleatum 7/1, F. nucleatum ATCC23726, F. nucleatum ChDC-F317, F. nucleatum Fn3-1-27, F. nucleatum Fn3-1-36A2, F. nucleatum Fn4-8, F. nucleatum Fn71, F. nucleatum KCOM-1322, F. nucleatum KCOM-2931, or F. nucleatum MGYG-HGUT-01347.

58. The use or method as defined in claim 30, wherein the subject is a mammal, optionally wherein the subject is a human.

The application's sequence listing, which the Patent Office published only in electronic form, follows.

SEQUENCE LISTING (4562 sequences)

SEQ ID NO: 1 - protein, 3484 aa, Fusobacterium nucleatum
METDTLLLWVLLLWVPGSTGDEVNTEQMKVVPTREEIVSSKENLKNSVGGLQTKINDARSENEKALKGLRLELIQLMEQGNQVVKSPWSSWQFGMNYFYDHWGSEYKGRGDKPQKYLFNGIYTRGNWKVRNAMDVAENQRVGGRPLTPGNDSLNSWKNANNSSNSGVKIDRDNSISSSTNGNRSWGLVDLENLREPTNEVEILARISPKEVTKQAISLNITEPTVQTLEAPDVNPQVNEPLPAPVIDLPEVETVTINPLTINAPDAPTAPSAPTINIGITAPSAPSAPTINVVPTSPSTPSAPTINIGIQPPSITPLSITTPDSVDAPNVVSPQIKPVDFTVDPGGDSNAYSSEKHNSHQGWKASWSKTINVTELTNRNYVSLTRDTADSTIPTDQVINVTKENNRAMVVDEVRKNGIVVDFKGTINLQRSQNVGIDLQGTHQGSKSDPLIANIYNSGKIIGNAKYGSTANKEQIAFGFNNADGSNNTTMTNMVNKGEITLNAPSSAGIQLKPEDPHDWQPNSWNAAPLQIDNKTPNKIKGRVLMKADNQKDINLNGSGSFGMVTVFNEGVPKRLFAPSYVTNYENLRSERTYDGERVLPGGEIGRSALSDSKYTSGVYNTGNININGDSSIGVGLLQEIQEVKLAGNINIGTKAVTQETGISNLPNAGSKTYSINKVEEAVGVFAGVPTMPVKPGETDTLINGSGARNTATSLVGTETVEINGNISLGEHATQSIGALVGDTEVDLNKGQLTENGVNKGSNADRKLKRSGDITAKSNSIINVGGKKNYGFVVSNSAHSSKFGTTVDSLEYKVDKTHHGKGINEGKINVTGDESVGFAMIKGGDSKSSGIISVGNNAENSIGFYGKEDSFTNSGTIEVTSAKKKNKAVVLDGTNASNKINFTNTGNIYVNTSDNGNKNLDGDGNIGIYAQGNYKIEHNSGIVKAGKDAIAFYVKNSTGEVNINAPIELANSNKATTIGIYSDGDAKVKFGASSSLKIGEKAVGLYSADPTKFNNTFEIETGKTLNVELGKNSTFGLLNGNKNVTNSPLLSKYLNNNTTDKINITKFDEGASLFYATLKAKAILDEDYKVTNADAASTSVLVANDGANVEIASGKKLETNTNVGLVATKGAGASLSTSVAENKGTLISTRTDKGIGIYTYTANGENSGTIIMKNQNSVGILGSGGSNLKNTGKIELEAISSAGVYAENSNMINSGTASEIVVKKKASVGIYARETSISSVPKNVKNEGKIEIKADGDGKSAGIYSKKEGGAKLTIENTGNIEVAQKASAGIYAKNESNQANTESVVTNSGLIKMSAENSIGIMGEKSKVENSGTGTKGIEIAGKKSAGILVTKESEVVNSGRILLANNSILASSDGLVGISVDGSSTGENDASGEIKIDAAYSTGMLSSGGDITNAGKIDLEKKESIGIYATNANVTNNGATTKGIFIKDEKSVGIYSKINSSSTADKIVTNSGTIDIGGTSKTGSAGIYSIVENGATKRLSTVSSGNITISQKESVGIYAKNKSSQANIESVVTNSGNGKIEVKNEGSAGILVEKSKVTNTAVGTNGIIVSAKKSAGIIGKLGSEIINSGIIKTETATPTAAADGVVGISLNASKATNDSNGTITLDTNYSTGMFGENSSTAINEGNITGTNKENIVGMAGKATTVTNKKTITLSAKKSTGIFGEDNSTLLNDTNGNITVKEESSVGIYSKGNNKIAENKGIILAEKKKSAGMLGSEGKLENSNSITTQDEESAGMYVENSSATNKKTITANGKKSAGVYVKLDKAAGGTIAGTNEGTNATITMTNEGSAAMLGEVKSLVTNNSATLTLTNQNSIVVNTKETVGMMITNDTTGIPNSNVKALNTGTIDLNSGATNKDNIGILANKRATGINEKNINVNSKSSVGMLAKEGSNIENNTTFSTINLKAESGIGMLADGKDASGNISTALNNARIVATSIGKRSLGMLAQNNGKVGNNKNIDILAENGVGIFVSETGVGENTSTGTISLENKESVGIFAKNNGTNDTAKNSGTINLGKADGSTSHESLIGMFAQAESGKTASVKNTKDININTKKSVGMYAKNDASNITDVDLENTGDININSQESAGIYAPKSNISKVGTITLKNSTVSNGSSAVYVSNGGKVADTASAKINLGKVNQNRVAYYVNGKDSALAGANIGKITGYGVGVYLQGASGDKATLDSNTSKLDYTAQGTGNGIIGLLLKGETDIQSYIKGIKVGNTVPRSNPSDKDKYAIGIYADAQGTAGTPYNITTPITAGKSGVGIFADKDSNINYTGNMEIGDGTTAGTGIFITKKIGATGGRVTLGSNTIKLKGTKGVVAIASEGTEFNGGTATIELEGKDVQGVGVYGKKGSDVDVSHWNFNNHGNSAEEVRSEEGKVHINGNKNLKPRMVLTHVINGETSIVTGKTVTSVNDGTITAKENIGLMAEGIKNHGMTIWQEGNFEAVNHGTIDFSAAEKSTAMFINSARGKNDGTIKVGKNSIGIYGFYNKDTRKYEGAPASPDPNKLEIETTSNSKISLGDASTGMYLINAEKIENKGGQITSESGATKNVGIYAVNGQDSINVNNKNLTMTTAANIALGNGSVGLYSKGQSYTVRNSVTNTGNITVGDKMTGSPSVAMYAENTNLTTDSKITVGKDGIAFYGKNSDITAKGSANFSNKGVLAYLENSKFISHLGNLGATQNTMLYLKNSIAQLDGAGTKVDMDVADGYTGAYIEGNSTLTGVKTIKLGQDSTGLFLKDANFVSNAESITGTKDKARGILATNSNLTNNSKIFLSGAESIGIYSNANNTKSVVNNGELTIAGKKTLGVFLKGSQSLENKANINIADSANSLEPTIGIYTAEGSSNIRHTSGTIDVGQKSIGIYSTTNSNVEMNGGKIHVKDQGIGIYKQNGKATIKGELDIDTHIATTKDSEPTGVYAVNGTEINDQASKISIGAKSYGFILNNTDVNNTNIYNNTDAGTVTMGNDSVFLYSNGKAIINNKRDISANNSNHLIAFYIKNGGDFTNNGTIDFSTGKGNIGIYAPGGKATNKGRILVGATDDIDPMTGKVYTDVSKTVYGIGMAADNGGHIVNEGEIRIYNNKSIGMYGKGVGTTVENKGTISLDGSRATATNKIQSMTGVYVDDGATFKNYGTITTTDSYAGRDGKVNENVTGLAGVAVMNGSTLENHGKIYIDADNSYGVLIRGKRDTKGNVERYAVIKNYGEIKVRGKGTWGISWKDVSQADIDELQKQINSKISSDPERQALREAEGTDKNYQGVTITVKDGKPTFLRNGVPISDSEVEQIGKLIGKESNLGMSDIGFYVDTLGRTKPIDIDGANPPINSQLIIGTEYSEKTNKKQWFVKGDVIKPFLDQIQGRNFKLTSIAGSLTWIATPVLDNYGQITGVAMAKLPYTSFVKKTDNAWNFTDGLEQRYDMNALDSVEKRIFNKLNGIGKNEEALLTQAYDEMMGHQYANVQQRSAWSHPQFEK

SEQ ID NO: 2 - protein, 363 aa, Fusobacterium nucleatum
METDTLLLWVLLLWVPGSTGDEVNTEQMKVVPTREEIVSSKENLKNSVGGLQTKINDARSENEKALKGLRLELIQLMEQGNQVVKSPWSSWQFGMNYFYDHWGSEYKGRGDKPQKYLFNGIYTRGNWKVRNAMDVAENQRVGGRPLTPGNDSLNSWKNANNSSNSGVKIDRDNSISSSTNGNRSWGLVDLENLREPTNEVEILARISPKEVTKQAISLNITEPTVQTLEAPDVNPQVNEPLPAPVIDLPEVETVTINPLTINAPDAPTAPSAPTINIGITAPSAPSAPTINVVPTSPSTPSAPTINIGIQPPSITPLSITTPDSVDAPNVVSPQIKPVDFTVDPGGDSNAGGGSAWSHPQFEK

SEQ ID NO: 3 - protein, 1072 aa, Fusobacterium nucleatum
METDTLLLWVLLLWVPGSTGDEVNTEQMKVVPTREEIVSSKENLKNSVGGLQTKINDARSENEKALKGLRLELIQLMEQGNQVVKSPWSSWQFGMNYFYDHWGSEYKGRGDKPQKYLFNGIYTRGNWKVRNAMDVAENQRVGGRPLTPGNDSLNSWKNANNSSNSGVKIDRDNSISSSTNGNRSWGLVDLENLREPTNEVEILARISPKEVTKQAISLNITEPTVQTLEAPDVNPQVNEPLPAPVIDLPEVETVTINPLTINAPDAPTAPSAPTINIGITAPSAPSAPTINVVPTSPSTPSAPTINIGIQPPSITPLSITTPDSVDAPNVVSPQIKPVDFTVDPGGDSNAYSSEKHNSHQGWKASWSKTINVTELTNRNYVSLTRDTADSTIPTDQVINVTKENNRAMVVDEVRKNGIVVDFKGTINLQRSQNVGIDLQGTHQGSKSDPLIANIYNSGKIIGNAKYGSTANKEQIAFGFNNADGSNNTTMTNMVNKGEITLNAPSSAGIQLKPEDPHDWQPNSWNAAPLQIDNKTPNKIKGRVLMKADNQKDINLNGSGSFGMVTVFNEGVPKRLFAPSYVTNYENLRSERTYDGERVLPGGEIGRSALSDSKYTSGVYNTGNININGDSSIGVGLLQEIQEVKLAGNINIGTKAVTQETGISNLPNAGSKTYSINKVEEAVGVFAGVPTMPVKPGETDTLINGSGARNTATSLVGTETVEINGNISLGEHATQSIGALVGDTEVDLNKGQLTENGVNKGSNADRKLKRSGDITAKSNSIINVGGKKNYGFVVSNSAHSSKFGTTVDSLEYKVDKTHHGKGINEGKINVTGDESVGFAMIKGGDSKSSGIISVGNNAENSIGFYGKEDSFTNSGTIEVTSAKKKNKAVVLDGTNASNKINFTNTGNIYVNTSDNGNKNLDGDGNIGIYAQGNYKIEHNSGIVKAGKDAIAFYVKNSTGEVNINAPIELANSNKATTIGIYSDGDAKVKFGASSSLKIGEKAVGLYSADPTKFNNTFEIETGKTLNVELGKNSTFGLLNGNKNVTNSPLLSKYLNNNTTDGGGSAWSHPQFEK

SEQ ID NO: 4 - protein, 1619 aa, Fusobacterium nucleatum
METDTLLLWVLLLWVPGSTGDEVNTEQMKVVPTREEIVSSKENLKNSVGGLQTKINDARSENEKALKGLRLELIQLMEQGNQVVKSPWSSWQFGMNYFYDHWGSEYKGRGDKPQKYLFNGIYTRGNWKVRNAMDVAENQRVGGRPLTPGNDSLNSWKNANNSSNSGVKIDRDNSISSSTNGNRSWGLVDLENLREPTNEVEILARISPKEVTKQAISLNITEPTVQTLEAPDVNPQVNEPLPAPVIDLPEVETVTINPLTINAPDAPTAPSAPTINIGITAPSAPSAPTINVVPTSPSTPSAPTINIGIQPPSITPLSITTPDSVDAPNVVSPQIKPVDFTVDPGGDSNAYSSEKHNSHQGWKASWSKTINVTELTNRNYVSLTRDTADSTIPTDQVINVTKENNRAMVVDEVRKNGIVVDFKGTINLQRSQNVGIDLQGTHQGSKSDPLIANIYNSGKIIGNAKYGSTANKEQIAFGFNNADGSNNTTMTNMVNKGEITLNAPSSAGIQLKPEDPHDWQPNSWNAAPLQIDNKTPNKIKGRVLMKADNQKDINLNGSGSFGMVTVFNEGVPKRLFAPSYVTNYENLRSERTYDGERVLPGGEIGRSALSDSKYTSGVYNTGNININGDSSIGVGLLQEIQEVKLAGNINIGTKAVTQETGISNLPNAGSKTYSINKVEEAVGVFAGVPTMPVKPGETDTLINGSGARNTATSLVGTETVEINGNISLGEHATQSIGALVGDTEVDLNKGQLTENGVNKGSNADRKLKRSGDITAKSNSIINVGGKKNYGFVVSNSAHSSKFGTTVDSLEYKVDKTHHGKGINEGKINVTGDESVGFAMIKGGDSKSSGIISVGNNAENSIGFYGKEDSFTNSGTIEVTSAKKKNKAVVLDGTNASNKINFTNTGNIYVNTSDNGNKNLDGDGNIGIYAQGNYKIEHNSGIVKAGKDAIAFYVKNSTGEVNINAPIELANSNKATTIGIYSDGDAKVKFGASSSLKIGEKAVGLYSADPTKFNNTFEIETGKTLNVELGKNSTFGLLNGNKNVTNSPLLSKYLNNNTTDKINITKFDEGASLFYATLKAKAILDEDYKVTNADAASTSVLVANDGANVEIASGKKLETNTNVGLVATKGAGASLSTSVAENKGTLISTRTDKGIGIYTYTANGENSGTIIMKNQNSVGILGSGGSNLKNTGKIELEAISSAGVYAENSNMINSGTASEIVVKKKASVGIYARETSISSVPKNVKNEGKIEIKADGDGKSAGIYSKKEGGAKLTIENTGNIEVAQKASAGIYAKNESNQANTESVVTNSGLIKMSAENSIGIMGEKSKVENSGTGTKGIEIAGKKSAGILVTKESEVVNSGRILLANNSILASSDGLVGISVDGSSTGENDASGEIKIDAAYSTGMLSSGGDITNAGKIDLEKKESIGIYATNANVTNNGATTKGIFIKDEKSVGIYSKINSSSTADKIVTNSGTIDIGGTSKTGSAGIYSIVENGATKRLSTVSSGNITISQKESVGIYAKNKSSQANIESVVTNSGNGKIEVKNEGSAGILVEKSKVTNTAVGTNGIIVSAKKSAGIIGKLGSEIINSGIIKTETATPTAAADGVGGGSAWSHPQFEK

SEQ ID NO: 5 - protein, 2266 aa, Fusobacterium nucleatum
METDTLLLWVLLLWVPGSTGDEVNTEQMKVVPTREEIVSSKENLKNSVGGLQTKINDARSENEKALKGLRLELIQLMEQGNQVVKSPWSSWQFGMNYFYDHWGSEYKGRGDKPQKYLFNGIYTRGNWKVRNAMDVAENQRVGGRPLTPGNDSLNSWKNANNSSNSGVKIDRDNSISSSTNGNRSWGLVDLENLREPTNEVEILARISPKEVTKQAISLNITEPTVQTLEAPDVNPQVNEPLPAPVIDLPEVETVTINPLTINAPDAPTAPSAPTINIGITAPSAPSAPTINVVPTSPSTPSAPTINIGIQPPSITPLSITTPDSVDAPNVVSPQIKPVDFTVDPGGDSNAYSSEKHNSHQGWKASWSKTINVTELTNRNYVSLTRDTADSTIPTDQVINVTKENNRAMVVDEVRKNGIVVDFKGTINLQRSQNVGIDLQGTHQGSKSDPLIANIYNSGKIIGNAKYGSTANKEQIAFGFNNADGSNNTTMTNMVNKGEITLNAPSSAGIQLKPEDPHDWQPNSWNAAPLQIDNKTPNKIKGRVLMKADNQKDINLNGSGSFGMVTVFNEGVPKRLFAPSYVTNYENLRSERTYDGERVLPGGEIGRSALSDSKYTSGVYNTGNININGDSSIGVGLLQEIQEVKLAGNINIGTKAVTQETGISNLPNAGSKTYSINKVEEAVGVFAGVPTMPVKPGETDTLINGSGARNTATSLVGTETVEINGNISLGEHATQSIGALVGDTEVDLNKGQLTENGVNKGSNADRKLKRSGDITAKSNSIINVGGKKNYGFVVSNSAHSSKFGTTVDSLEYKVDKTHHGKGINEGKINVTGDESVGFAMIKGGDSKSSGIISVGNNAENSIGFYGKEDSFTNSGTIEVTSAKKKNKAVVLDGTNASNKINFTNTGNIYVNTSDNGNKNLDGDGNIGIYAQGNYKIEHNSGIVKAGKDAIAFYVKNSTGEVNINAPIELANSNKATTIGIYSDGDAKVKFGASSSLKIGEKAVGLYSADPTKFNNTFEIETGKTLNVELGKNSTFGLLNGNKNVTNSPLLSKYLNNNTTDKINITKFDEGASLFYATLKAKAILDEDYKVTNADAASTSVLVANDGANVEIASGKKLETNTNVGLVATKGAGASLSTSVAENKGTLISTRTDKGIGIYTYTANGENSGTIIMKNQNSVGILGSGGSNLKNTGKIELEAISSAGVYAENSNMINSGTASEIVVKKKASVGIYARETSISSVPKNVKNEGKIEIKADGDGKSAGIYSKKEGGAKLTIENTGNIEVAQKASAGIYAKNESNQANTESVVTNSGLIKMSAENSIGIMGEKSKVENSGTGTKGIEIAGKKSAGILVTKESEVVNSGRILLANNSILASSDGLVGISVDGSSTGENDASGEIKIDAAYSTGMLSSGGDITNAGKIDLEKKESIGIYATNANVTNNGATTKGIFIKDEKSVGIYSKINSSSTADKIVTNSGTIDIGGTSKTGSAGIYSIVENGATKRLSTVSSGNITISQKESVGIYAKNKSSQANIESVVTNSGNGKIEVKNEGSAGILVEKSKVTNTAVGTNGIIVSAKKSAGIIGKLGSEIINSGIIKTETATPTAAADGVVGISLNASKATNDSNGTITLDTNYSTGMFGENSSTAINEGNITGTNKENIVGMAGKATTVTNKKTITLSAKKSTGIFGEDNSTLLNDTNGNITVKEESSVGIYSKGNNKIAENKGIILAEKKKSAGMLGSEGKLENSNSITTQDEESAGMYVENSSATNKKTITANGKKSAGVYVKLDKAAGGTIAGTNEGTNATITMTNEGSAAMLGEVKSLVTNNSATLTLTNQNSIVVNTKETVGMMITNDTTGIPNSNVKALNTGTIDLNSGATNKDNIGILANKRATGINEKNINVNSKSSVGMLAKEGSNIENNTTFSTINLKAESGIGMLADGKDASGNISTALNNARIVATSIGKRSLGMLAQNNGKVGNNKNIDILAENGVGIFVSETGVGENTSTGTISLENKESVGIFAKNNGTNDTAKNSGTINLGKADGSTSHESLIGMFAQAESGKTASVKNTKDININTKKSVGMYAKNDASNITDVDLENTGDININSQESAGIYAPKSNISKVGTITLKNSTVSNGSSAVYVSNGGKVADTASAKINLGKVNQNRVAYYVNGKDSALAGANIGKITGYGVGVYLQGASGDKATLDSNTSKLDYTAQGTGNGIIGLLLKGETDIQSYIKGIKVGNTVPRSNPSDKDKYAIGGGGSAWSHPQFEK

SEQ ID NO: 6 - DNA, 10458 bp, Fusobacterium nucleatum
  source 1..10458: mol_type = other DNA
atggaaacagacacattgctgctatgggtcctgctgctctgggttccaggctccactggtgacgaagtgaacactgagcaaatgaaggtggtgccaacacgcgaagagatcgtctcgagcaaagagaacctgaagaactccgtcggaggactgcagaccaaaatcaacgacgccagatccgaaaacgaaaaggcgctgaaggggctgagactggagctaatacagctgatggaacagggaaaccaagtggtcaagtccccttggtcctcttggcagttcggcatgaactacttctacgaccactggggaagcgaatacaaggggcggggggacaagccccagaagtacctgttcaacggaatctacaccagaggtaactggaaagtgcggaacgccatggacgtagccgagaaccagagagttggtggaagacccctgacgcctggcaacgactctctgaacagctggaagaacgctaacaacagcagcaactccggcgtgaagatcgacagagacaacagcatctcttctagcacaaacgggaaccggagctggggcctggtggacctggaaaacctccgagaacctaccaacgaagtcgagatcctggcgagaatcagccccaaagaggtgaccaagcaggcaataagcctaaacatcacagaacctaccgtgcagaccctggaggcccctgacgtgaacccccaggtgaacgagcctctgcctgcccctgtgatagacctgcccgaagtagaaacggtgaccatcaaccctctgactatcaacgctcctgacgctcctaccgcgccttctgcgcctacaatcaacatcggcataacagcccccagcgcgcctagcgcccctaccatcaacgtggtgcccaccagcccctccacacctagcgcccctacgatcaacatcggcatccaacctcctagcatcacccctctgagcatcaccacgcctgacagcgttgacgccccaaacgtcgtatctccgcagatcaagccggtcgacttcacagtggaccctggcggggacagcaacgcttactctagcgagaagcacaacagccaccagggctggaaggccagctggtccaagaccatcaacgtgacagagctgaccaaccggaactacgtgtccctgacaagagacaccgctgactcgaccatcccaacagaccaggtgataaacgtgaccaaagagaacaacagagccatggtggttgacgaggtgagaaagaacgggatcgtagtggacttcaagggcaccatcaacctgcagagaagccagaacgtgggcatcgacctgcaaggtacacaccagggcagcaagagcgacccactgatcgccaacatctacaactccggaaagatcatcggcaacgccaaatacggaagcacggccaacaaggagcagatcgccttcggattcaacaacgccgacggctccaacaacacgaccatgaccaacatggtgaacaaaggagagataacactgaacgcgccttcctccgccggtatccaactgaagcctgaagacccccacgactggcagcctaactcttggaacgccgcgccactgcaaatcgacaacaagacgcccaacaaaatcaagggcagagtgctgatgaaggctgacaaccagaaagacataaacctgaacggctcaggcagcttcggcatggtcaccgtgttcaacgagggcgtacccaagagactgttcgcacccagctacgtaacaaactacgagaacttgcggtccgagcggacatacgacggcgagagagtgctgccaggcggcgagatcggccggagcgctctgtctgactctaaatacacatccggcgtgtacaacaccggcaacatcaacatcaacggtgacagctctatcggcgtgggcctgctgcaggagatacaggaggtgaagctcgccgggaacatcaacataggcaccaaggctgttacacaggagactggcatcagcaacctgcccaacgccgggtcgaaaacctacagcatcaacaaggtcgaagaggccgtgggagtgttcgccggcgtccctacgatgcctgtgaagcctggcgagacagacaccctgatcaacggctctggcgcaagaaacacagccacttccttggtgggcaccgagacagtggagatcaacggaaacatcagcctcggcgagcacgcgacccagtcaatcggcgccctggtgggcgacacggaagtggacctcaacaagggtcagctgaccgagaacggcgtaaacaaaggctctaacgccgacagaaagctgaagagaagcggggacatcacagcaaagagcaacagcatcatcaacgtgggcggaaaaaagaactacggattcgtggtgtctaactcagcccacagcagcaagttcggcacaaccgtggacagcctcgagtacaaggtggacaaaacccaccacggaaaaggcatcaacgaaggcaaaatcaacgtaacgggcgacgagtccgttggtttcgccatgatcaagggaggcgacagcaagagcagcggcatcatctctgtaggcaacaacgcggagaactccatcggcttctacggcaaggaggactccttcaccaacagcgggacaatagaggtgacgagcgcaaagaagaagaacaaggccgtagtgctggacgggacaaacgcttctaacaagatcaacttcaccaacaccggtaacatatacgtcaacactagcgacaacggaaacaagaacttggacggggacggcaacatcggtatctacgcccaaggtaactacaaaatcgagcacaacagcggcatcgtcaaggccggaaaggacgccatcgccttctacgtgaaaaactcaacaggagaagtgaacatcaacgcccctatcgagctggctaacagcaacaaggcaactactatcgggatctacagcgacggcgacgccaaggtaaaattcggggccagctcctcacttaagatcggggaaaaggctgtggggctctacagcgccgaccccacaaagttcaacaacacattcgaaatcgaaaccggcaagacactgaacgtggagctaggtaagaacagcacattcggccttctgaacggcaacaaaaacgttactaactccccactgctgtcaaagtacctgaacaacaacaccacggacaagatcaacatcaccaagttcgacgaaggcgcctccctgttctacgccacactgaaggccaaggccatcctggacgaggactacaaggtgacaaacgctgacgccgctagcacctctgtcctagtggccaacgacggggccaacgtggagatcgccagcgggaagaagctggaaaccaacacaaacgtgggcctggtggccaccaagggggctggcgcctctctgagcacctcagttgcggaaaacaaggggacccttatctctactcggacagacaagggcatcggcatctacacgtacacagccaacggtgagaacagcggaaccatcatcatgaaaaaccagaactccgttgggatactgggctccggaggatccaacctgaagaacacagggaagatcgagctggaagctatcagcagcgccggcgtgtacgccgaaaacagcaacatgatcaacagcgggacagcatcagagatcgtagtgaaaaagaaggcgtccgtgggcatctacgcccgcgaaacaagcatcagctctgtgccaaagaacgtgaaaaacgaggggaaaatcgagataaaagccgacggcgacgggaaatccgccggcatctactcgaagaaggagggcggcgccaaactgaccatcgaaaacacggggaacatcgaggtcgctcaaaaagcatcggccggcatctacgcgaaaaacgaatctaaccaggccaacacagagtctgtcgtgaccaacagcggcttaatcaagatgagcgccgagaacagcatcggcatcatgggcgaaaagagcaaggtagaaaactcaggtaccggaacaaaggggatcgagatcgccggaaaaaagagcgcaggcatcctggtgacaaaggaatctgaagtggtgaactccggcaggatccttctggccaacaactcaatcctggcgagctctgacggcctcgttggcatcagcgttgacggcagcagcacgggcgagaacgacgcctcaggagagatcaagatcgacgccgcctactctacaggaatgctctcttctggaggcgacatcaccaacgcaggaaaaatcgacctggaaaaaaaggaatctataggcatctacgccacaaacgccaacgtgacaaacaacggggctaccacgaaaggcatcttcatcaaggacgaaaagagcgttggcatctacagcaagatcaacagctctagcacggccgacaagatcgtcacaaactctggtaccatcgacataggcggaacaagcaagaccgggtccgcgggcatctactctatcgtggagaacggagctactaagagactgagcacggtatcctcggggaacatcaccatctctcagaaggagtcagtgggtatctacgccaagaacaaatcaagccaggccaacatcgagtctgttgttacaaactcagggaacggcaagatcgaggtcaagaacgagggctctgccggcatcctggtggaaaagagcaaggttaccaacacagctgtaggcaccaacggcataatcgtgagcgccaagaagtctgccggaataatcgggaagctgggcagcgaaatcatcaactcaggcataatcaagactgaaacagccacaccaacggccgccgccgacggtgtcgtcggcatcagcctgaacgcgtctaaggccaccaacgacagcaacggtacaatcacgctcgacacaaactacagcacaggcatgttcggtgagaacagctctacagcgataaacgaaggaaacatcacaggtaccaacaaggaaaacatagtcggcatggcgggtaaggccacaactgtcacaaacaagaagaccatcacgttgtccgccaaaaaatctactggcatcttcggcgaggacaacagcacgctcttgaacgacaccaacggcaacatcaccgtgaaggaagagtcctccgtcggcatctactcaaagggcaacaacaagatcgctgaaaacaagggcatcatcctcgccgaaaaaaagaagtctgccggaatgttgggttcagagggcaagctggagaacagcaacagcatcaccacccaggacgaggaaagcgccggaatgtacgtcgagaacagcagcgcaacaaacaaaaaaacaatcacagctaacggcaaaaagtcagcaggcgtgtacgtgaagctggacaaggctgccggaggcaccatcgcgggtacgaacgagggaaccaacgccaccatcacgatgacgaacgagggcagcgctgccatgctgggagaagtgaagtccctcgtgaccaacaactcggccactctgacactgaccaaccaaaacagcatcgtagtgaacaccaaggaaaccgtgggcatgatgatcactaacgacaccacaggcatccctaactccaacgtcaaggccctgaacacaggcaccatcgacctgaactccggcgctaccaacaaggacaacataggaatcctggccaacaagcgggccaccggaatcaacgagaagaacatcaacgtgaactccaaatcttctgtgggaatgctggctaaagagggttccaacatcgagaacaacaccaccttcagcaccatcaacctgaaggcagaatccggcatcggaatgctggccgacggcaaagacgcctctggcaacatatccacagccctgaacaacgctcggatagttgccacttccatcggcaagagatctctgggcatgctggcgcagaacaacggaaaagtcggcaacaacaaaaacatagacatcctggccgaaaacggagtgggcatcttcgtgagcgaaaccggcgtgggagagaacaccagcactggtactatcagcctggaaaacaaggagagcgtgggtatcttcgccaagaacaacggcaccaacgacaccgctaagaacagcggcactataaacctgggaaaggctgacggaagcacctctcacgagagcctgatcggcatgttcgcccaggccgagtccggtaagacagccagcgtgaagaacaccaaagacatcaacataaacaccaaaaagagcgttggcatgtacgccaaaaacgacgcctctaacatcaccgacgtggacctggaaaacaccggtgacataaacataaactcccaagagagcgcagggatctacgcccccaagtctaacatctcaaaggtgggaaccatcaccctgaaaaactccacagtgtctaacggcagcagcgctgtgtacgtgagcaacggaggaaaggtggccgacacagcatccgcgaagatcaacctcgggaaagtgaaccagaacagagtggcttactacgtgaacggtaaggactcagcgctcgccggcgccaacatcggcaagatcacagggtacggcgtgggagtatacctgcagggcgcgtctggagacaaggccaccctggactcgaacaccagcaaactggactacaccgcccagggcacaggcaacggcatcatcggcctactgctgaagggtgaaacagacatccagagctacatcaaaggcatcaaggttggtaacacggttcctagaagcaaccccagcgacaaagacaaatacgcaataggcatatacgccgacgcccaggggaccgccggcactccctacaacatcaccacccctatcacggccggaaagtccggtgtgggcatcttcgctgacaaggacagcaacatcaactacacaggcaacatggaaatcggtgacggcaccacagccggcactggcatcttcatcacaaagaagatcggggcaacaggcgggagagtgaccctgggcagcaacactatcaagctgaagggaacgaagggtgtagtggctatcgcctctgagggtacggaattcaacggtggcaccgccacaatcgagctggagggcaaggacgtgcagggtgtgggcgtgtacggcaagaagggctccgacgtagacgtgtcccactggaacttcaacaaccacggaaactcggctgaagaagtgagaagcgaagagggcaaagtgcacatcaacggcaacaaaaacctgaaaccccggatggtgcttacacacgtgatcaacggcgaaacatcaatcgtgacggggaaaaccgtgaccagcgtaaacgacggcaccatcaccgcaaaggaaaacatcggcctgatggcggagggtatcaaaaaccacggcatgaccatctggcaggagggaaacttcgaggccgtgaaccacgggactatcgacttcagcgcagctgaaaagagcaccgctatgttcatcaactcggctcggggcaagaacgacggaacgatcaaagtgggaaagaactcaatcgggatctacggtttctacaacaaggacacccggaagtacgagggtgctcctgcctcccctgaccctaacaagttagagatcgaaaccaccagcaactctaaaatctccctgggcgacgcctctacgggaatgtacctcatcaacgccgagaaaatcgagaacaagggcggtcaaatcacctctgagtccggggctactaagaacgtgggcatctacgccgttaacggccaagacagcataaacgtgaacaacaagaacctaacaatgacgacggccgcaaacatcgccctcggcaacggatccgttgggctgtactccaagggccagtcctacacagtccggaactccgtgacaaacactggtaacatcacggttggcgacaagatgaccggctctccttcagtcgccatgtacgctgaaaacactaacctgacaaccgacagcaagatcacggttggtaaagacggcatcgccttctacggcaagaacagcgacatcacagccaagggatctgccaacttcagcaacaagggggtcctggcctacctggaaaactcaaagttcatctcccacctgggtaacctgggggccacccagaacaccatgctgtacctgaaaaactcaatagcgcagctggacggtgccggcaccaaggtggacatggacgtggccgacggctacactggcgcctacatcgagggcaacagcacattgacaggcgtgaaaacgatcaagctgggccaggactcaaccggcctcttcctgaaagacgccaacttcgtgagcaacgccgagagcatcaccgggaccaaggacaaggccagaggaatcctagcgaccaacagcaacctcactaacaacagcaaaatcttcctgagcggggccgagtctatcggcatctactcaaacgctaacaacaccaagtcggtagtcaacaacggagaactcaccatcgcaggcaagaagactctgggagtgttcctgaagggttcccagagcctggaaaacaaggcgaacatcaacatcgccgactctgccaacagcctggaacccacaatcggcatctacacggccgaaggaagcagcaacatacggcacacctctggcaccatcgacgtgggacagaaatctatcggcatatactcgacaactaactcgaacgtggagatgaacggaggtaagatccacgtgaaggaccagggcatcggaatctacaagcagaacggaaaggccactatcaagggagagttggacatcgacacgcacatcgcaaccaccaaggacagcgagcccaccggcgtgtacgcggtgaacgggacagaaatcaacgaccaggcctccaagatcagcatcggagcaaagtcatacggcttcatcctgaacaacaccgacgtgaacaacactaacatctacaacaacaccgacgctgggaccgtgaccatgggcaacgacagcgtgttcctgtactccaacggtaaggccatcatcaacaacaaaagggacatctctgcgaacaactcgaaccacctgatcgctttctacatcaaaaacggcggcgacttcacaaacaacggcactatcgacttcagcaccggtaaaggcaacatcggcatctacgcccccggcggtaaggctacaaacaagggccggatcctggtgggcgccactgacgacatcgaccctatgacaggaaaggtgtacacagacgtcagcaaaaccgtgtacggaatcggcatggccgccgacaacggcggccacatcgtgaacgaaggcgaaatcaggatctacaacaacaaaagcatcgggatgtacgggaagggggtgggcacaacagtggagaacaaagggacgatcagcctggacggcagcagagccaccgccacgaacaagatccagagcatgacaggagtttacgtggacgacggcgctacattcaaaaactacggaacaatcaccacaaccgactcttacgccggacgagacggcaaggtcaacgagaacgtgaccggtctggctggcgtggccgtgatgaacgggtctaccctggaaaaccacggcaaaatctacatagacgctgacaacagctacggcgtgctcatcagaggcaaacgggacaccaaggggaacgtggaaagatacgcagtgatcaaaaactacggggagatcaaagttcggggcaaaggcacttggggcatctcttggaaggacgtgtcccaggctgacatcgacgagctgcaaaagcagatcaactctaagatcagctctgaccctgagagacaggccctccgggaggcagagggcacggacaagaactaccagggcgtgaccatcacagtgaaggacggaaagcctaccttcctgagaaacggcgtgcctatcagcgactctgaggtagaacagatcggcaaacttatcggcaaagagtctaacctgggaatgagcgacatcgggttctacgtggacaccctgggacgaacaaagcccatcgacatcgacggcgcaaaccctccaatcaactctcagctgataatagggacagagtacagcgagaaaaccaacaaaaagcaatggttcgtgaagggagacgtgataaagcccttcctggaccagatccagggtagaaacttcaaactgacatccatcgccggcagcctgacctggatcgctacccctgtgctggacaactacggccagataaccggggtggccatggctaagctgccctacacatctttcgtgaagaagacagacaacgcctggaacttcaccgacggccttgaacagagatacgacatgaacgccctggacagcgtagagaaaagaatcttcaacaagctgaacggaatagggaaaaacgaagaggccctgctgactcaggcttacgacgagatgatgggtcaccagtacgccaacgttcagcagagatctgcctggtcccacccccaattcgagaagtgatga

SEQ ID NO: 7 - DNA, 1095 bp, Fusobacterium nucleatum
  source 1..1095: mol_type = other DNA
atggaaacagacacattgctgctatgggtcctgctgctctgggttccaggctccactggtgacgaagtgaacactgagcaaatgaaggtggtgccaacacgcgaagagatcgtctcgagcaaagagaacctgaagaactccgtcggaggactgcagaccaaaatcaacgacgccagatccgaaaacgaaaaggcgctgaaggggctgagactggagctaatacagctgatggaacagggaaaccaagtggtcaagtccccttggtcctcttggcagttcggcatgaactacttctacgaccactggggaagcgaatacaaggggcggggggacaagccccagaagtacctgttcaacggaatctacaccagaggtaactggaaagtgcggaacgccatggacgtagccgagaaccagagagttggtggaagacccctgacgcctggcaacgactctctgaacagctggaagaacgctaacaacagcagcaactccggcgtgaagatcgacagagacaacagcatctcttctagcacaaacgggaaccggagctggggcctggtggacctggaaaacctccgagaacctaccaacgaagtcgagatcctggcgagaatcagccccaaagaggtgaccaagcaggcaataagcctaaacatcacagaacctaccgtgcagaccctggaggcccctgacgtgaacccccaggtgaacgagcctctgcctgcccctgtgatagacctgcccgaagtagaaacggtgaccatcaaccctctgactatcaacgctcctgacgctcctaccgcgccttctgcgcctacaatcaacatcggcataacagcccccagcgcgcctagcgcccctaccatcaacgtggtgcccaccagcccctccacacctagcgcccctacgatcaacatcggcatccaacctcctagcatcacccctctgagcatcaccacgcctgacagcgttgacgccccaaacgtcgtatctccgcagatcaagccggtcgacttcacagtggaccctggcggggacagcaacgctggcggaggctctgcctggtcccacccccaattcgagaagtgatga

SEQ ID NO: 8 - DNA, 3222 bp, Fusobacterium nucleatum
  source 1..3222: mol_type = other DNA
atggaaacagacacattgctgctatgggtcctgctgctctgggttccaggctccactggtgacgaagtgaacactgagcaaatgaaggtggtgccaacacgcgaagagatcgtctcgagcaaagagaacctgaagaactccgtcggaggactgcagaccaaaatcaacgacgccagatccgaaaacgaaaaggcgctgaaggggctgagactggagctaatacagctgatggaacagggaaaccaagtggtcaagtccccttggtcctcttggcagttcggcatgaactacttctacgaccactggggaagcgaatacaaggggcggggggacaagccccagaagtacctgttcaacggaatctacaccagaggtaactggaaagtgcggaacgccatggacgtagccgagaaccagagagttggtggaagacccctgacgcctggcaacgactctctgaacagctggaagaacgctaacaacagcagcaactccggcgtgaagatcgacagagacaacagcatctcttctagcacaaacgggaaccggagctggggcctggtggacctggaaaacctccgagaacctaccaacgaagtcgagatcctggcgagaatcagccccaaagaggtgaccaagcaggcaataagcctaaacatcacagaacctaccgtgcagaccctggaggcccctgacgtgaacccccaggtgaacgagcctctgcctgcccctgtgatagacctgcccgaagtagaaacggtgaccatcaaccctctgactatcaacgctcctgacgctcctaccgcgccttctgcgcctacaatcaacatcggcataacagcccccagcgcgcctagcgcccctaccatcaacgtggtgcccaccagcccctccacacctagcgcccctacgatcaacatcggcatccaacctcctagcatcacccctctgagcatcaccacgcctgacagcgttgacgccccaaacgtcgtatctccgcagatcaagccggtcgacttcacagtggaccctggcggggacagcaacgcttactctagcgagaagcacaacagccaccagggctggaaggccagctggtccaagaccatcaacgtgacagagctgaccaaccggaactacgtgtccctgacaagagacaccgctgactcgaccatcccaacagaccaggtgataaacgtgaccaaagagaacaacagagccatggtggttgacgaggtgagaaagaacgggatcgtagtggacttcaagggcaccatcaacctgcagagaagccagaacgtgggcatcgacctgcaaggtacacaccagggcagcaagagcgacccactgatcgccaacatctacaactccggaaagatcatcggcaacgccaaatacggaagcacggccaacaaggagcagatcgccttcggattcaacaacgccgacggctccaacaacacgaccatgaccaacatggtgaacaaaggagagataacactgaacgcgccttcctccgccggtatccaactgaagcctgaagacccccacgactggcagcctaactcttggaacgccgcgccactgcaaatcgacaacaagacgcccaacaaaatcaagggcagagtgctgatgaaggctgacaaccagaaagacataaacctgaacggctcaggcagcttcggcatggtcaccgtgttcaacgagggcgtacccaagagactgttcgcacccagctacgtaacaaactacgagaacttgcggtccgagcggacatacgacggcgagagagtgctgccaggcggcgagatcggccggagcgctctgtctgactctaaatacacatccggcgtgtacaacaccggcaacatcaacatcaacggtgacagctctatcggcgtgggcctgctgcaggagatacaggaggtgaagctcgccgggaacatcaacataggcaccaaggctgttacacaggagactggcatcagcaacctgcccaacgccgggtcgaaaacctacagcatcaacaaggtcgaagaggccgtgggagtgttcgccggcgtccctacgatgcctgtgaagcctggcgagacagacaccctgatcaacggctctggcgcaagaaacacagccacttccttggtgggcaccgagacagtggagatcaacggaaacatcagcctcggcgagcacgcgacccagtcaatcggcgccctggtgggcgacacggaagtggacctcaacaagggtcagctgaccgagaacggcgtaaacaaaggctctaacgccgacagaaagctgaagagaagcggggacatcacagcaaagagcaacagcatcatcaacgtgggcggaaaaaagaactacggattcgtggtgtctaactcagcccacagcagcaagttcggcacaaccgtggacagcctcgagtacaaggtggacaaaacccaccacggaaaaggcatcaacgaaggcaaaatcaacgtaacgggcgacgagtccgttggtttcgccatgatcaagggaggcgacagcaagagcagcggcatcatctctgtaggcaacaacgcggagaactccatcggcttctacggcaaggaggactccttcaccaacagcgggacaatagaggtgacgagcgcaaagaagaagaacaaggccgtagtgctggacgggacaaacgcttctaacaagatcaacttcaccaacaccggtaacatatacgtcaacactagcgacaacggaaacaagaacttggacggggacggcaacatcggtatctacgcccaaggtaactacaaaatcgagcacaacagcggcatcgtcaaggccggaaaggacgccatcgccttctacgtgaaaaactcaacaggagaagtgaacatcaacgcccctatcgagctggctaacagcaacaaggcaactactatcgggatctacagcgacggcgacgccaaggtaaaattcggggccagctcctcacttaagatcggggaaaaggctgtggggctctacagcgccgaccccacaaagttcaacaacacattcgaaatcgaaaccggcaagacactgaacgtggagctaggtaagaacagcacattcggccttctgaacggcaacaaaaacgttactaactccccactgctgtcaaagtacctgaacaacaacaccacggacggcggaggctctgcctggtcccacccccaattcgagaagtgatga

SEQ ID NO: 9 - DNA, 4863 bp, Fusobacterium nucleatum
  source 1..4863: mol_type = other DNA
atggaaacagacacattgctgctatgggtcctgctgctctgggttccaggctccactggtgacgaagtgaacactgagcaaatgaaggtggtgccaacacgcgaagagatcgtctcgagcaaagagaacctgaagaactccgtcggaggactgcagaccaaaatcaacgacgccagatccgaaaacgaaaaggcgctgaaggggctgagactggagctaatacagctgatggaacagggaaaccaagtggtcaagtccccttggtcctcttggcagttcggcatgaactacttctacgaccactggggaagcgaatacaaggggcggggggacaagccccagaagtacctgttcaacggaatctacaccagaggtaactggaaagtgcggaacgccatggacgtagccgagaaccagagagttggtggaagacccctgacgcctggcaacgactctctgaacagctggaagaacgctaacaacagcagcaactccggcgtgaagatcgacagagacaacagcatctcttctagcacaaacgggaaccggagctggggcctggtggacctggaaaacctccgagaacctaccaacgaagtcgagatcctggcgagaatcagccccaaagaggtgaccaagcaggcaataagcctaaacatcacagaacctaccgtgcagaccctggaggcccctgacgtgaacccccaggtgaacgagcctctgcctgcccctgtgatagacctgcccgaagtagaaacggtgaccatcaaccctctgactatcaacgctcctgacgctcctaccgcgccttctgcgcctacaatcaacatcggcataacagcccccagcgcgcctagcgcccctaccatcaacgtggtgcccaccagcccctccacacctagcgcccctacgatcaacatcggcatccaacctcctagcatcacccctctgagcatcaccacgcctgacagcgttgacgccccaaacgtcgtatctccgcagatcaagccggtcgacttcacagtggaccctggcggggacagcaacgcttactctagcgagaagcacaacagccaccagggctggaaggccagctggtccaagaccatcaacgtgacagagctgaccaaccggaactacgtgtccctgacaagagacaccgctgactcgaccatcccaacagaccaggtgataaacgtgaccaaagagaacaacagagccatggtggttgacgaggtgagaaagaacgggatcgtagtggacttcaagggcaccatcaacctgcagagaagccagaacgtgggcatcgacctgcaaggtacacaccagggcagcaagagcgacccactgatcgccaacatctacaactccggaaagatcatcggcaacgccaaatacggaagcacggccaacaaggagcagatcgccttcggattcaacaacgccgacggctccaacaacacgaccatgaccaacatggtgaacaaaggagagataacactgaacgcgccttcctccgccggtatccaactgaagcctgaagacccccacgactggcagcctaactcttggaacgccgcgccactgcaaatcgacaacaagacgcccaacaaaatcaagggcagagtgctgatgaaggctgacaaccagaaagacataaacctgaacggctcaggcagcttcggcatggtcaccgtgttcaacgagggcgtacccaagagactgttcgcacccagctacgtaacaaactacgagaacttgcggtccgagcggacatacgacggcgagagagtgctgccaggcggcgagatcggccggagcgctctgtctgactctaaatacacatccggcgtgtacaacaccggcaacatcaacatcaacggtgacagctctatcggcgtgggcctgctgcaggagatacaggaggtgaagctcgccgggaacatcaacataggcaccaaggctgttacacaggagactggcatcagcaacctgcccaacgccgggtcgaaaacctacagcatcaacaaggtcgaagaggccgtgggagtgttcgccggcgtccctacgatgcctgtgaagcctggcgagacagacaccctgatcaacggctctggcgcaagaaacacagccacttccttggtgggcaccgagacagtggagatcaacggaaacatcagcctcggcgagcacgcgacccagtcaatcggcgccctggtgggcgacacggaagtggacctcaacaagggtcagctgaccgagaacggcgtaaacaaaggctctaacgccgacagaaagctgaagagaagcggggacatcacagcaaagagcaacagcatcatcaacgtgggcggaaaaaagaactacggattcgtggtgtctaactcagcccacagcagcaagttcggcacaaccgtggacagcctcgagtacaaggtggacaaaacccaccacggaaaaggcatcaacgaaggcaaaatcaacgtaacgggcgacgagtccgttggtttcgccatgatcaagggaggcgacagcaagagcagcggcatcatctctgtaggcaacaacgcggagaactccatcggcttctacggcaaggaggactccttcaccaacagcgggacaatagaggtgacgagcgcaaagaagaagaacaaggccgtagtgctggacgggacaaacgcttctaacaagatcaacttcaccaacaccggtaacatatacgtcaacactagcgacaacggaaacaagaacttggacggggacggcaacatcggtatctacgcccaaggtaactacaaaatcgagcacaacagcggcatcgtcaaggccggaaaggacgccatcgccttctacgtgaaaaactcaacaggagaagtgaacatcaacgcccctatcgagctggctaacagcaacaaggcaactactatcgggatctacagcgacggcgacgccaaggtaaaattcggggccagctcctcacttaagatcggggaaaaggctgtggggctctacagcgccgaccccacaaagttcaacaacacattcgaaatcgaaaccggcaagacactgaacgtggagctaggtaagaacagcacattcggccttctgaacggcaacaaaaacgttactaactccccactgctgtcaaagtacctgaacaacaacaccacggacaagatcaacatcaccaagttcgacgaaggcgcctccctgttctacgccacactgaaggccaaggccatcctggacgaggactacaaggtgacaaacgctgacgccgctagcacctctgtcctagtggccaacgacggggccaacgtggagatcgccagcgggaagaagctggaaaccaacacaaacgtgggcctggtggccaccaagggggctggcgcctctctgagcacctcagttgcggaaaacaaggggacccttatctctactcggacagacaagggcatcggcatctacacgtacacagccaacggtgagaacagcggaaccatcatcatgaaaaaccagaactccgttgggatactgggctccggaggatccaacctgaagaacacagggaagatcgagctggaagctatcagcagcgccggcgtgtacgccgaaaacagcaacatgatcaacagcgggacagcatcagagatcgtagtgaaaaagaaggcgtccgtgggcatctacgcccgcgaaacaagcatcagctctgtgccaaagaacgtgaaaaacgaggggaaaatcgagataaaagccgacggcgacgggaaatccgccggcatctactcgaagaaggagggcggcgccaaactgaccatcgaaaacacggggaacatcgaggtcgctcaaaaagcatcggccggcatctacgcgaaaaacgaatctaaccaggccaacacagagtctgtcgtgaccaacagcggcttaatcaagatgagcgccgagaacagcatcggcatcatgggcgaaaagagcaaggtagaaaactcaggtaccggaacaaaggggatcgagatcgccggaaaaaagagcgcaggcatcctggtgacaaaggaatctgaagtggtgaactccggcaggatccttctggccaacaactcaatcctggcgagctctgacggcctcgttggcatcagcgttgacggcagcagcacgggcgagaacgacgcctcaggagagatcaagatcgacgccgcctactctacaggaatgctctcttctggaggcgacatcaccaacgcaggaaaaatcgacctggaaaaaaaggaatctataggcatctacgccacaaacgccaacgtgacaaacaacggggctaccacgaaaggcatcttcatcaaggacgaaaagagcgttggcatctacagcaagatcaacagctctagcacggccgacaagatcgtcacaaactctggtaccatcgacataggcggaacaagcaagaccgggtccgcgggcatctactctatcgtggagaacggagctactaagagactgagcacggtatcctcggggaacatcaccatctctcagaaggagtcagtgggtatctacgccaagaacaaatcaagccaggccaacatcgagtctgttgttacaaactcagggaacggcaagatcgaggtcaagaacgagggctctgccggcatcctggtggaaaagagcaaggttaccaacacagctgtaggcaccaacggcataatcgtgagcgccaagaagtctgccggaataatcgggaagctgggcagcgaaatcatcaactcaggcataatcaagactgaaacagccacaccaacggccgccgccgacggtgtcggcggaggctctgcctggtcccacccccaattcgagaagtgatga

SEQ ID NO: 10 - DNA, 6804 bp, Fusobacterium nucleatum
  source 1..6804: mol_type = other DNA
atggaaacagacacattgctgctatgggtcctgctgctctgggttccaggctccactggtgacgaagtgaacactgagcaaatgaaggtggtgccaacacgcgaagagatcgtctcgagcaaagagaacctgaagaactccgtcggaggactgcagaccaaaatcaacgacgccagatccgaaaacgaaaaggcgctgaaggggctgagactggagctaatacagctgatggaacagggaaaccaagtggtcaagtccccttggtcctcttggcagttcggcatgaactacttctacgaccactggggaagcgaatacaaggggcggggggacaagccccagaagtacctgttcaacggaatctacaccagaggtaactggaaagtgcggaacgccatggacgtagccgagaaccagagagttggtggaagacccctgacgcctggcaacgactctctgaacagctggaagaacgctaacaacagcagcaactccggcgtgaagatcgacagagacaacagcatctcttctagcacaaacgggaaccggagctggggcctggtggacctggaaaacctccgagaacctaccaacgaagtcgagatcctggcgagaatcagccccaaagaggtgaccaagcaggcaataagcctaaacatcacagaacctaccgtgcagaccctggaggcccctgacgtgaacccccaggtgaacgagcctctgcctgcccctgtgatagacctgcccgaagtagaaacggtgaccatcaaccctctgactatcaacgctcctgacgctcctaccgcgccttctgcgcctacaatcaacatcggcataacagcccccagcgcgcctagcgcccctaccatcaacgtggtgcccaccagcccctccacacctagcgcccctacgatcaacatcggcatccaacctcctagcatcacccctctgagcatcaccacgcctgacagcgttgacgccccaaacgtcgtatctccgcagatcaagccggtcgacttcacagtggaccctggcggggacagcaacgcttactctagcgagaagcacaacagccaccagggctggaaggccagctggtccaagaccatcaacgtgacagagctgaccaaccggaactacgtgtccctgacaagagacaccgctgactcgaccatcccaacagaccaggtgataaacgtgaccaaagagaacaacagagccatggtggttgacgaggtgagaaagaacgggatcgtagtggacttcaagggcaccatcaacctgcagagaagccagaacgtgggcatcgacctgcaaggtacacaccagggcagcaagagcgacccactgatcgccaacatctacaactccggaaagatcatcggcaacgccaaatacggaagcacggccaacaaggagcagatcgccttcggattcaacaacgccgacggctccaacaacacgaccatgaccaacatggtgaacaaaggagagataacactgaacgcgccttcctccgccggtatccaactgaagcctgaagacccccacgactggcagcctaactcttggaacgccgcgccactgcaaatcgacaacaagacgcccaacaaaatcaagggcagagtgctgatgaaggctgacaaccagaaagacataaacctgaacggctcaggcagcttcggcatggtcaccgtgttcaacgagggcgtacccaagagactgttcgcacccagctacgtaacaaactacgagaacttgcggtccgagcggacatacgacggcgagagagtgctgccaggcggcgagatcggccggagcgctctgtctgactctaaatacacatccggcgtgtacaacaccggcaacatcaacatcaacggtgacagctctatcggcgtgggcctgctgcaggagatacaggaggtgaagctcgccgggaacatcaacataggcaccaaggctgttacacaggagactggcatcagcaacctgcccaacgccgggtcgaaaacctacagcatcaacaaggtcgaagaggccgtgggagtgttcgccggcgtccctacgatgcctgtgaagcctggcgagacagacaccctgatcaacggctctggcgcaagaaacacagccacttccttggtgggcaccgagacagtggagatcaacggaaacatcagcctcggcgagcacgcgacccagtcaatcggcgccctggtgggcgacacggaagtggacctcaacaagggtcagctgaccgagaacggcgtaaacaaaggctctaacgccgacagaaagctgaagagaagcggggacatcacagcaaagagcaacagcatcatcaacgtgggcggaaaaaagaactacggattcgtggtgtctaactcagcccacagcagcaagttcggcacaaccgtggacagcctcgagtacaaggtggacaaaacccaccacggaaaaggcatcaacgaaggcaaaatcaacgtaacgggcgacgagtccgttggtttcgccatgatcaagggaggcgacagcaagagcagcggcatcatctctgtaggcaacaacgcggagaactccatcggcttctacggcaaggaggactccttcaccaacagcgggacaatagaggtgacgagcgcaaagaagaagaacaaggccgtagtgctggacgggacaaacgcttctaacaagatcaacttcaccaacaccggtaacatatacgtcaacactagcgacaacggaaacaagaacttggacggggacggcaacatcggtatctacgcccaaggtaactacaaaatcgagcacaacagcggcatcgtcaaggccggaaaggacgccatcgccttctacgtgaaaaactcaacaggagaagtgaacatcaacgcccctatcgagctggctaacagcaacaaggcaactactatcgggatctacagcgacggcgacgccaaggtaaaattcggggccagctcctcacttaagatcggggaaaaggctgtggggctctacagcgccgaccccacaaagttcaacaacacattcgaaatcgaaaccggcaagacactgaacgtggagctaggtaagaacagcacattcggccttctgaacggcaacaaaaacgttactaactccccactgctgtcaaagtacctgaacaacaacaccacggacaagatcaacatcaccaagttcgacgaaggcgcctccctgttctacgccacactgaaggccaaggccatcctggacgaggactacaaggtgacaaacgctgacgccgctagcacctctgtcctagtggccaacgacggggccaacgtggagatcgccagcgggaagaagctggaaaccaacacaaacgtgggcctggtggccaccaagggggctggcgcctctctgagcacctcagttgcggaaaacaaggggacccttatctctactcggacagacaagggcatcggcatctacacgtacacagccaacggtgagaacagcggaaccatcatcatgaaaaaccagaactccgttgggatactgggctccggaggatccaacctgaagaacacagggaagatcgagctggaagctatcagcagcgccggcgtgtacgccgaaaacagcaacatgatcaacagcgggacagcatcagagatcgtagtgaaaaagaaggcgtccgtgggcatctacgcccgcgaaacaagcatcagctctgtgccaaagaacgtgaaaaacgaggggaaaatcgagataaaagccgacggcgacgggaaatccgccggcatctactcgaagaaggagggcggcgccaaactgaccatcgaaaacacggggaacatcgaggtcgctcaaaaagcatcggccggcatctacgcgaaaaacgaatctaaccaggccaacacagagtctgtcgtgaccaacagcggcttaatcaagatgagcgccgagaacagcatcggcatcatgggcgaaaagagcaaggtagaaaactcaggtaccggaacaaaggggatcgagatcgccggaaaaaagagcgcaggcatcctggtgacaaaggaatctgaagtggtgaactccggcaggatccttctggccaacaactcaatcctggcgagctctgacggcctcgttggcatcagcgttgacggcagcagcacgggcgagaacgacgcctcaggagagatcaagatcgacgccgcctactctacaggaatgctctcttctggaggcgacatcaccaacgcaggaaaaatcgacctggaaaaaaaggaatctataggcatctacgccacaaacgccaacgtgacaaacaacggggctaccacgaaaggcatcttcatcaaggacgaaaagagcgttggcatctacagcaagatcaacagctctagcacggccgacaagatcgtcacaaactctggtaccatcgacataggcggaacaagcaagaccgggtccgcgggcatctactctatcgtggagaacggagctactaagagactgagcacggtatcctcggggaacatcaccatctctcagaaggagtcagtgggtatctacgccaagaacaaatcaagccaggccaacatcgagtctgttgttacaaactcagggaacggcaagatcgaggtcaagaacgagggctctgccggcatcctggtggaaaagagcaaggttaccaacacagctgtaggcaccaacggcataatcgtgagcgccaagaagtctgccggaataatcgggaagctgggcagcgaaatcatcaactcaggcataatcaagactgaaacagccacaccaacggccgccgccgacggtgtcgtcggcatcagcctgaacgcgtctaaggccaccaacgacagcaacggtacaatcacgctcgacacaaactacagcacaggcatgttcggtgagaacagctctacagcgataaacgaaggaaacatcacaggtaccaacaaggaaaacatagtcggcatggcgggtaaggccacaactgtcacaaacaagaagaccatcacgttgtccgccaaaaaatctactggcatcttcggcgaggacaacagcacgctcttgaacgacaccaacggcaacatcaccgtgaaggaagagtcctccgtcggcatctactcaaagggcaacaacaagatcgctgaaaacaagggcatcatcctcgccgaaaaaaagaagtctgccggaatgttgggttcagagggcaagctggagaacagcaacagcatcaccacccaggacgaggaaagcgccggaatgtacgtcgagaacagcagcgcaacaaacaaaaaaacaatcacagctaacggcaaaaagtcagcaggcgtgtacgtgaagctggacaaggctgccggaggcaccatcgcgggtacgaacgagggaaccaacgccaccatcacgatgacgaacgagggcagcgctgccatgctgggagaagtgaagtccctcgtgaccaacaactcggccactctgacactgaccaaccaaaacagcatcgtagtgaacaccaaggaaaccgtgggcatgatgatcactaacgacaccacaggcatccctaactccaacgtcaaggccctgaacacaggcaccatcgacctgaactccggcgctaccaacaaggacaacataggaatcctggccaacaagcgggccaccggaatcaacgagaagaacatcaacgtgaactccaaatcttctgtgggaatgctggctaaagagggttccaacatcgagaacaacaccaccttcagcaccatcaacctgaaggcagaatccggcatcggaatgctggccgacggcaaagacgcctctggcaacatatccacagccctgaacaacgctcggatagttgccacttccatcggcaagagatctctgggcatgctggcgcagaacaacggaaaagtcggcaacaacaaaaacatagacatcctggccgaaaacggagtgggcatcttcgtgagcgaaaccggcgtgggagagaacaccagcactggtactatcagcctggaaaacaaggagagcgtgggtatcttcgccaagaacaacggcaccaacgacaccgctaagaacagcggcactataaacctgggaaaggctgacggaagcacctctcacgagagcctgatcggcatgttcgcccaggccgagtccggtaagacagccagcgtgaagaacaccaaagacatcaacataaacaccaaaaagagcgttggcatgtacgccaaaaacgacgcctctaacatcaccgacgtggacctggaaaacaccggtgacataaacataaactcccaagagagcgcagggatctacgcccccaagtctaacatctcaaaggtgggaaccatcaccctgaaaaactccacagtgtctaacggcagcagcgctgtgtacgtgagcaacggaggaaaggtggccgacacagcatccgcgaagatcaacctcgggaaagtgaaccagaacagagtggcttactacgtgaacggtaaggactcagcgctcgccggcgccaacatcggcaagatcacagggtacggcgtgggagtatacctgcagggcgcgtctggagacaaggccaccctggactcgaacaccagcaaactggactacaccgcccagggcacaggcaacggcatcatcggcctactgctgaagggtgaaacagacatccagagctacatcaaaggcatcaaggttggtaacacggttcctagaagcaaccccagcgacaaagacaaatacgcaataggcggcggaggctctgcctggtcccacccccaattcgagaagtgatga

SEQ ID NO: 11 - DNA, 10857 bp, Fusobacterium nucleatum
  source 1..10857: mol_type = other DNA
atggaaacagacacattgctgctatgggtcctgctgctctgggttccaggctccactggtgacgaagtgaacactgagcaaatgaaggtggtgccaacacgcgaagagatcgtctcgagcaaagagaacctgaagaactccgtcggaggactgcagaccaaaatcaacgacgccagatccgaaaacgaaaaggcgctgaaggggctgagactggagctaatacagctgatggaacagggaaaccaagtggtcaagtccccttggtcctcttggcagttcggcatgaactacttctacgaccactggggaagcgaatacaaggggcggggggacaagccccagaagtacctgttcaacggaatctacaccagaggtaactggaaagtgcggaacgccatggacgtagccgagaaccagagagttggtggaagacccctgacgcctggcaacgactctctgaacagctggaagaacgctaacaacagcagcaactccggcgtgaagatcgacagagacaacagcatctcttctagcacaaacgggaaccggagctggggcctggtggacctggaaaacctccgagaacctaccaacgaagtcgagatcctggcgagaatcagccccaaagaggtgaccaagcaggcaataagcctaaacatcacagaacctaccgtgcagaccctggaggcccctgacgtgaacccccaggtgaacgagcctctgcctgcccctgtgatagacctgcccgaagtagaaacggtgaccatcaaccctctgactatcaacgctcctgacgctcctaccgcgccttctgcgcctacaatcaacatcggcataacagcccccagcgcgcctagcgcccctaccatcaacgtggtgcccaccagcccctccacacctagcgcccctacgatcaacatcggcatccaacctcctagcatcacccctctgagcatcaccacgcctgacagcgttgacgccccaaacgtcgtatctccgcagatcaagccggtcgacttcacagtggaccctggcggggacagcaacgcttactctagcgagaagcacaacagccaccagggctggaaggccagctggtccaagaccatcaacgtgacagagctgaccaaccggaactacgtgtccctgacaagagacaccgctgactcgaccatcccaacagaccaggtgataaacgtgaccaaagagaacaacagagccatggtggttgacgaggtgagaaagaacgggatcgtagtggacttcaagggcaccatcaacctgcagagaagccagaacgtgggcatcgacctgcaaggtacacaccagggcagcaagagcgacccactgatcgccaacatctacaactccggaaagatcatcggcaacgccaaatacggaagcacggccaacaaggagcagatcgccttcggattcaacaacgccgacggctccaacaacacgaccatgaccaacatggtgaacaaaggagagataacactgaacgcgccttcctccgccggtatccaactgaagcctgaagacccccacgactggcagcctaactcttggaacgccgcgccactgcaaatcgacaacaagacgcccaacaaaatcaagggcagagtgctgatgaaggctgacaaccagaaagacataaacctgaacggctcaggcagcttcggcatggtcaccgtgttcaacgagggcgtacccaagagactgttcgcacccagctacgtaacaaactacgagaacttgcggtccgagcggacatacgacggcgagagagtgctgccaggcggcgagatcggccggagcgctctgtctgactctaaatacacatccggcgtgtacaacaccggcaacatcaacatcaacggtgacagctctatcggcgtgggcctgctgcaggagatacaggaggtgaagctcgccgggaacatcaacataggcaccaaggctgttacacaggagactggcatcagcaacctgcccaacgccgggtcgaaaacctacagcatcaacaaggtcgaagaggccgtgggagtgttcgccggcgtccctacgatgcctgtgaagcctggcgagacagacaccctgatcaacggctctggcgcaagaaacacagccacttccttggtgggcaccgagacagtggagatcaacggaaacatcagcctcggcgagcacgcgacccagtcaatcggcgccctggtgggcgacacggaagtggacctcaacaagggtcagctgaccgagaacggcgtaaacaaaggctctaacgccgacagaaagctgaagagaagcggggacatcacagcaaagagcaacagcatcatcaacgtgggcggaaaaaagaactacggattcgtggtgtctaactcagcccacagcagcaagttcggcacaaccgtggacagcctcgagtacaaggtggacaaaacccaccacggaaaaggcatcaacgaaggcaaaatcaacgtaacgggcgacgagtccgttggtttcgccatgatcaagggaggcgacagcaagagcagcggcatcatctctgtaggcaacaacgcggagaactccatcggcttctacggcaaggaggactccttcaccaacagcgggacaatagaggtgacgagcgcaaagaagaagaacaaggccgtagtgctggacgggacaaacgcttctaacaagatcaacttcaccaacaccggtaacatatacgtcaacactagcgacaacggaaacaagaacttggacggggacggcaacatcggtatctacgcccaaggtaactacaaaatcgagcacaacagcggcatcgtcaaggccggaaaggacgccatcgccttctacgtgaaaaactcaacaggagaagtgaacatcaacgcccctatcgagctggctaacagcaacaaggcaactactatcgggatctacagcgacggcgacgccaaggtaaaattcggggccagctcctcacttaagatcggggaaaaggctgtggggctctacagcgccgaccccacaaagttcaacaacacattcgaaatcgaaaccggcaagacactgaacgtggagctaggtaagaacagcacattcggccttctgaacggcaacaaaaacgttactaactccccactgctgtcaaagtacctgaacaacaacaccacggacaagatcaacatcaccaagttcgacgaaggcgcctccctgttctacgccacactgaaggccaaggccatcctggacgaggactacaaggtgacaaacgctgacgccgctagcacctctgtcctagtggccaacgacggggccaacgtggagatcgccagcgggaagaagctggaaaccaacacaaacgtgggcctggtggccaccaagggggctggcgcctctctgagcacctcagttgcggaaaacaaggggacccttatctctactcggacagacaagggcatcggcatctacacgtacacagccaacggtgagaacagcggaaccatcatcatgaaaaaccagaactccgttgggatactgggctccggaggatccaacctgaagaacacagggaagatcgagctggaagctatcagcagcgccggcgtgtacgccgaaaacagcaacatgatcaacagcgggacagcatcagagatcgtagtgaaaaagaaggcgtccgtgggcatctacgcccgcgaaacaagcatcagctctgtgccaaagaacgtgaaaaacgaggggaaaatcgagataaaagccgacggcgacgggaaatccgccggcatctactcgaagaaggagggcggcgccaaactgaccatcgaaaacacggggaacatcgaggtcgctcaaaaagcatcggccggcatctacgcgaaaaacgaatctaaccaggccaacacagagtctgtcgtgaccaacagcggcttaatcaagatgagcgccgagaacagcatcggcatcatgggcgaaaagagcaaggtagaaaactcaggtaccggaacaaaggggatcgagatcgccggaaaaaagagcgcaggcatcctggtgacaaaggaatctgaagtggtgaactccggcaggatccttctggccaacaactcaatcctggcgagctctgacggcctcgttggcatcagcgttgacggcagcagcacgggcgagaacgacgcctcaggagagatcaagatcgacgccgcctactctacaggaatgctctcttctggaggcgacatcaccaacgcaggaaaaatcgacctggaaaaaaaggaatctataggcatctacgccacaaacgccaacgtgacaaacaacggggctaccacgaaaggcatcttcatcaaggacgaaaagagcgttggcatctacagcaagatcaacagctctagcacggccgacaagatcgtcacaaactctggtaccatcgacataggcggaacaagcaagaccgggtccgcgggcatctactctatcgtggagaacggagctactaagagactgagcacggtatcctcggggaacatcaccatctctcagaaggagtcagtgggtatctacgccaagaacaaatcaagccaggccaacatcgagtctgttgttacaaactcagggaacggcaagatcgaggtcaagaacgagggctctgccggcatcctggtggaaaagagcaaggttaccaacacagctgtaggcaccaacggcataatcgtgagcgccaagaagtctgccggaataatcgggaagctgggcagcgaaatcatcaactcaggcataatcaagactgaaacagccacaccaacggccgccgccgacggtgtcgtcggcatcagcctgaacgcgtctaaggccaccaacgacagcaacggtacaatcacgctcgacacaaactacagcacaggcatgttcggtgagaacagctctacagcgataaacgaaggaaacatcacaggtaccaacaaggaaaacatagtcggcatggcgggtaaggccacaactgtcacaaacaagaagaccatcacgttgtccgccaaaaaatctactggcatcttcggcgaggacaacagcacgctcttgaacgacaccaacggcaacatcaccgtgaaggaagagtcctccgtcggcatctactcaaagggcaacaacaagatcgctgaaaacaagggcatcatcctcgccgaaaaaaagaagtctgccggaatgttgggttcagagggcaagctggagaacagcaacagcatcaccacccaggacgaggaaagcgccggaatgtacgtcgagaacagcagcgcaacaaacaaaaaaacaatcacagctaacggcaaaaagtcagcaggcgtgtacgtgaagctggacaaggctgccggaggcaccatcgcgggtacgaacgagggaaccaacgccaccatcacgatgacgaacgagggcagcgctgccatgctgggagaagtgaagtccctcgtgaccaacaactcggccactctgacactgaccaaccaaaacagcatcgtagtgaacaccaaggaaaccgtgggcatgatgatcactaacgacaccacaggcatccctaactccaacgtcaaggccctgaacacaggcaccatcgacctgaactccggcgctaccaacaaggacaacataggaatcctggccaacaagcgggccaccggaatcaacgagaagaacatcaacgtgaactccaaatcttctgtgggaatgctggctaaagagggttccaacatcgagaacaacaccaccttcagcaccatcaacctgaaggcagaatccggcatcggaatgctggccgacggcaaagacgcctctggcaacatatccacagccctgaacaacgctcggatagttgccacttccatcggcaagagatctctgggcatgctggcgcagaacaacggaaaagtcggcaacaacaaaaacatagacatcctggccgaaaacggagtgggcatcttcgtgagcgaaaccggcgtgggagagaacaccagcactggtactatcagcctggaaaacaaggagagcgtgggtatcttcgccaagaacaacggcaccaacgacaccgctaagaacagcggcactataaacctgggaaaggctgacggaagcacctctcacgagagcctgatcggcatgttcgcccaggccgagtccggtaagacagccagcgtgaagaacaccaaagacatcaacataaacaccaaaaagagcgttggcatgtacgccaaaaacgacgcctctaacatcaccgacgtggacctggaaaacaccggtgacataaacataaactcccaagagagcgcagggatctacgcccccaagtctaacatctcaaaggtgggaaccatcaccctgaaaaactccacagtgtctaacggcagcagcgctgtgtacgtgagcaacggaggaaaggtggccgacacagcatccgcgaagatcaacctcgggaaagtgaaccagaacagagtggcttactacgtgaacggtaaggactcagcgctcgccggcgccaacatcggcaagatcacagggtacggcgtgggagtatacctgcagggcgcgtctggagacaaggccaccctggactcgaacaccagcaaactggactacaccgcccagggcacaggcaacggcatcatcggcctactgctgaagggtgaaacagacatccagagctacatcaaaggcatcaaggttggtaacacggttcctagaagcaaccccagcgacaaagacaaatacgcaataggcatatacgccgacgcccaggggaccgccggcactccctacaacatcaccacccctatcacggccggaaagtccggtgtgggcatcttcgctgacaaggacagcaacatcaactacacaggcaacatggaaatcggtgacggcaccacagccggcactggcatcttcatcacaaagaagatcggggcaacaggcgggagagtgaccctgggcagcaacactatcaagctgaagggaacgaagggtgtagtggctatcgcctctgagggtacggaattcaacggtggcaccgccacaatcgagctggagggcaaggacgtgcagggtgtgggcgtgtacggcaagaagggctccgacgtagacgtgtcccactggaacttcaacaaccacggaaactcggctgaagaagtgagaagcgaagagggcaaagtgcacatcaacggcaacaaaaacctgaaaccccggatggtgcttacacacgtgatcaacggcgaaacatcaatcgtgacggggaaaaccgtgaccagcgtaaacgacggcaccatcaccgcaaaggaaaacatcggcctgatggcggagggtatcaaaaaccacggcatgaccatctggcaggagggaaacttcgaggccgtgaaccacgggactatcgacttcagcgcagctgaaaagagcaccgctatgttcatcaactcggctcggggcaagaacgacggaacgatcaaagtgggaaagaactcaatcgggatctacggtttctacaacaaggacacccggaagtacgagggtgctcctgcctcccctgaccctaacaagttagagatcgaaaccaccagcaactctaaaatctccctgggcgacgcctctacgggaatgtacctcatcaacgccgagaaaatcgagaacaagggcggtcaaatcacctctgagtccggggctactaagaacgtgggcatctacgccgttaacggccaagacagcataaacgtgaacaacaagaacctaacaatgacgacggccgcaaacatcgccctcggcaacggatccgttgggctgtactccaagggccagtcctacacagtccggaactccgtgacaaacactggtaacatcacggttggcgacaagatgaccggctctccttcagtcgccatgtacgctgaaaacactaacctgacaaccgacagcaagatcacggttggtaaagacggcatcgccttctacggcaagaacagcgacatcacagccaagggatctgccaacttcagcaacaagggggtcctggcctacctggaaaactcaaagttcatctcccacctgggtaacctgggggccacccagaacaccatgctgtacctgaaaaactcaatagcgcagctggacggtgccggcaccaaggtggacatggacgtggccgacggctacactggcgcctacatcgagggcaacagcacattgacaggcgtgaaaacgatcaagctgggccaggactcaaccggcctcttcctgaaagacgccaacttcgtgagcaacgccgagagcatcaccgggaccaaggacaaggccagaggaatcctagcgaccaacagcaacctcactaacaacagcaaaatcttcctgagcggggccgagtctatcggcatctactcaaacgctaacaacaccaagtcggtagtcaacaacggagaactcaccatcgcaggcaagaagactctgggagtgttcctgaagggttcccagagcctggaaaacaaggcgaacatcaacatcgccgactctgccaacagcctggaacccacaatcggcatctacacggccgaaggaagcagcaacatacggcacacctctggcaccatcgacgtgggacagaaatctatcggcatatactcgacaactaactcgaacgtggagatgaacggaggtaagatccacgtgaaggaccagggcatcggaatctacaagcagaacggaaaggccactatcaagggagagttggacatcgacacgcacatcgcaaccaccaaggacagcgagcccaccggcgtgtacgcggtgaacgggacagaaatcaacgaccaggcctccaagatcagcatcggagcaaagtcatacggcttcatcctgaacaacaccgacgtgaacaacactaacatctacaacaacaccgacgctgggaccgtgaccatgggcaacgacagcgtgttcctgtactccaacggtaaggccatcatcaacaacaaaagggacatctctgcgaacaactcgaaccacctgatcgctttctacatcaaaaacggcggcgacttcacaaacaacggcactatcgacttcagcaccggtaaaggcaacatcggcatctacgcccccggcggtaaggctacaaacaagggccggatcctggtgggcgccactgacgacatcgaccctatgacaggaaaggtgtacacagacgtcagcaaaaccgtgtacggaatcggcatggccgccgacaacggcggccacatcgtgaacgaaggcgaaatcaggatctacaacaacaaaagcatcgggatgtacgggaagggggtgggcacaacagtggagaacaaagggacgatcagcctggacggcagcagagccaccgccacgaacaagatccagagcatgacaggagtttacgtggacgacggcgctacattcaaaaactacggaacaatcaccacaaccgactcttacgccggacgagacggcaaggtcaacgagaacgtgaccggtctggctggcgtggccgtgatgaacgggtctaccctggaaaaccacggcaaaatctacatagacgctgacaacagctacggcgtgctcatcagaggcaaacgggacaccaaggggaacgtggaaagatacgcagtgatcaaaaactacggggagatcaaagttcggggcaaaggcacttggggcatctcttggaaggacgtgtcccaggctgacatcgacgagctgcaaaagcagatcaactctaagatcagctctgaccctgagagacaggccctccgggaggcagagggcacggacaagaactaccagggcgtgaccatcacagtgaaggacggaaagcctaccttcctgagaaacggcgtgcctatcagcgactctgaggtagaacagatcggcaaacttatcggcaaagagtctaacctgggaatgagcgacatcgggttctacgtggacaccctgggacgaacaaagcccatcgacatcgacggcgcaaaccctccaatcaactctcagctgataatagggacagagtacagcgagaaaaccaacaaaaagcaatggttcgtgaagggagacgtgataaagcccttcctggaccagatccagggtagaaacttcaaactgacatccatcgccggcagcctgacctggatcgctacccctgtgctggacaactacggccagataaccggggtggccatggctaagctgccctacacatctttcgtgaagaagacagacaacgcctggaacttcaccgacggccttgaacagagatacgacatgaacgccctggacagcgtagagaaaagaatcttcaacaagctgaacggaatagggaaaaacgaagaggccctgctgactcaggcttacgacgagatgatgggtcaccagtacgccaacgttcagcagagaggcggaggctctggaggagggtccggagggggctcaatggccaacaaacctatgcagccaatcaccagcaccgcaaacaagatcgtgtggtccgaccctacaagactgagcaccaccttcagcgctagcctgctgagacaaagagtgaaagtgggcatcgccgagctgaacaacgtgtctggacagtacgtgtccgtgtacaagcggcccgcccctaagcctgagggctgcgccgacgcctgcgtgatcatgcctaacgagaaccagagcatccggaccgtgatcagcggcagcgctgaaaacctggccacactcaaggccgaatgggagacacacaagagaaacgtcgacaccctgttcgccagcggcaacgccggcctgggcttcctggaccccaccgccgctatcgtgtcttctgacaccacagcctgatga

SEQ ID NO: 12 - DNA, 10689 bp, Fusobacterium nucleatum
  source 1..10689: mol_type = other DNA
atggaaacagacacattgctgctatgggtcctgctgctctgggttccaggctccactggtgacgaagtgaacactgagcaaatgaaggtggtgccaacacgcgaagagatcgtctcgagcaaagagaacctgaagaactccgtcggaggactgcagaccaaaatcaacgacgccagatccgaaaacgaaaaggcgctgaaggggctgagactggagctaatacagctgatggaacagggaaaccaagtggtcaagtccccttggtcctcttggcagttcggcatgaactacttctacgaccactggggaagcgaatacaaggggcggggggacaagccccagaagtacctgttcaacggaatctacaccagaggtaactggaaagtgcggaacgccatggacgtagccgagaaccagagagttggtggaagacccctgacgcctggcaacgactctctgaacagctggaagaacgctaacaacagcagcaactccggcgtgaagatcgacagagacaacagcatctcttctagcacaaacgggaaccggagctggggcctggtggacctggaaaacctccgagaacctaccaacgaagtcgagatcctggcgagaatcagccccaaagaggtgaccaagcaggcaataagcctaaacatcacagaacctaccgtgcagaccctggaggcccctgacgtgaacccccaggtgaacgagcctctgcctgcccctgtgatagacctgcccgaagtagaaacggtgaccatcaaccctctgactatcaacgctcctgacgctcctaccgcgccttctgcgcctacaatcaacatcggcataacagcccccagcgcgcctagcgcccctaccatcaacgtggtgcccaccagcccctccacacctagcgcccctacgatcaacatcggcatccaacctcctagcatcacccctctgagcatcaccacgcctgacagcgttgacgccccaaacgtcgtatctccgcagatcaagccggtcgacttcacagtggaccctggcggggacagcaacgcttactctagcgagaagcacaacagccaccagggctggaaggccagctggtccaagaccatcaacgtgacagagctgaccaaccggaactacgtgtccctgacaagagacaccgctgactcgaccatcccaacagaccaggtgataaacgtgaccaaagagaacaacagagccatggtggttgacgaggtgagaaagaacgggatcgtagtggacttcaagggcaccatcaacctgcagagaagccagaacgtgggcatcgacctgcaaggtacacaccagggcagcaagagcgacccactgatcgccaacatctacaactccggaaagatcatcggcaacgccaaatacggaagcacggccaacaaggagcagatcgccttcggattcaacaacgccgacggctccaacaacacgaccatgaccaacatggtgaacaaaggagagataacactgaacgcgccttcctccgccggtatccaactgaagcctgaagacccccacgactggcagcctaactcttggaacgccgcgccactgcaaatcgacaacaagacgcccaacaaaatcaagggcagagtgctgatgaaggctgacaaccagaaagacataaacctgaacggctcaggcagcttcggcatggtcaccgtgttcaacgagggcgtacccaagagactgttcgcacccagctacgtaacaaactacgagaacttgcggtccgagcggacatacgacggcgagagagtgctgccaggcggcgagatcggccggagcgctctgtctgactctaaatacacatccggcgtgtacaacaccggcaacatcaacatcaacggtgacagctctatcggcgtgggcctgctgcaggagatacaggaggtgaagctcgccgggaacatcaacataggcaccaaggctgttacacaggagactggcatcagcaacctgcccaacgccgggtcgaaaacctacagcatcaacaaggtcgaagaggccgtgggagtgttcgccggcgtccctacgatgcctgtgaagcctggcgagacagacaccctgatcaacggctctggcgcaagaaacacagccacttccttggtgggcaccgagacagtggagatcaacggaaacatcagcctcggcgagcacgcgacccagtcaatcggcgccctggtgggcgacacggaagtggacctcaacaagggtcagctgaccgagaacggcgtaaacaaaggctctaacgccgacagaaagctgaagagaagcggggacatcacagcaaagagcaacagcatcatcaacgtgggcggaaaaaagaactacggattcgtggtgtctaactcagcccacagcagcaagttcggcacaaccgtggacagcctcgagtacaaggtggacaaaacccaccacggaaaaggcatcaacgaaggcaaaatcaacgtaacgggcgacgagtccgttggtttcgccatgatcaagggaggcgacagcaagagcagcggcatcatctctgtaggcaacaacgcggagaactccatcggcttctacggcaaggaggactccttcaccaacagcgggacaatagaggtgacgagcgcaaagaagaagaacaaggccgtagtgctggacgggacaaacgcttctaacaagatcaacttcaccaacaccggtaacatatacgtcaacactagcgacaacggaaacaagaacttggacggggacggcaacatcggtatctacgcccaaggtaactacaaaatcgagcacaacagcggcatcgtcaaggccggaaaggacgccatcgccttctacgtgaaaaactcaacaggagaagtgaacatcaacgcccctatcgagctggctaacagcaacaaggcaactactatcgggatctacagcgacggcgacgccaaggtaaaattcggggccagctcctcacttaagatcggggaaaaggctgtggggctctacagcgccgaccccacaaagttcaacaacacattcgaaatcgaaaccggcaagacactgaacgtggagctaggtaagaacagcacattcggccttctgaacggcaacaaaaacgttactaactccccactgctgtcaaagtacctgaacaacaacaccacggacaagatcaacatcaccaagttcgacgaaggcgcctccctgttctacgccacactgaaggccaaggccatcctggacgaggactacaaggtgacaaacgctgacgccgctagcacctctgtcctagtggccaacgacggggccaacgtggagatcgccagcgggaagaagctggaaaccaacacaaacgtgggcctggtggccaccaagggggctggcgcctctctgagcacctcagttgcggaaaacaaggggacccttatctctactcggacagacaagggcatcggcatctacacgtacacagccaacggtgagaacagcggaaccatcatcatgaaaaaccagaactccgttgggatactgggctccggaggatccaacctgaagaacacagggaagatcgagctggaagctatcagcagcgccggcgtgtacgccgaaaacagcaacatgatcaacagcgggacagcatcagagatcgtagtgaaaaagaaggcgtccgtgggcatctacgcccgcgaaacaagcatcagctctgtgccaaagaacgtgaaaaacgaggggaaaatcgagataaaagccgacggcgacgggaaatccgccggcatctactcgaagaaggagggcggcgccaaactgaccatcgaaaacacggggaacatcgaggtcgctcaaaaagcatcggccggcatctacgcgaaaaacgaatctaaccaggccaacacagagtctgtcgtgaccaacagcggcttaatcaagatgagcgccgagaacagcatcggcatcatgggcgaaaagagcaaggtagaaaactcaggtaccggaacaaaggggatcgagatcgccggaaaaaagagcgcaggcatcctggtgacaaaggaatctgaagtggtgaactccggcaggatccttctggccaacaactcaatcctggcgagctctgacggcctcgttggcatcagcgttgacggcagcagcacgggcgagaacgacgcctcaggagagatcaagatcgacgccgcctactctacaggaatgctctcttctggaggcgacatcaccaacgcaggaaaaatcgacctggaaaaaaaggaatctataggcatctacgccacaaacgccaacgtgacaaacaacggggctaccacgaaaggcatcttcatcaaggacgaaaagagcgttggcatctacagcaagatcaacagctctagcacggccgacaagatcgtcacaaactctggtaccatcgacataggcggaacaagcaagaccgggtccgcgggcatctactctatcgtggagaacggagctactaagagactgagcacggtatcctcggggaacatcaccatctctcagaaggagtcagtgggtatctacgccaagaacaaatcaagccaggccaacatcgagtctgttgttacaaactcagggaacggcaagatcgaggtcaagaacgagggctctgccggcatcctggtggaaaagagcaaggttaccaacacagctgtaggcaccaacggcataatcgtgagcgccaagaagtctgccggaataatcgggaagctgggcagcgaaatcatcaactcaggcataatcaagactgaaacagccacaccaacggccgccgccgacggtgtcgtcggcatcagcctgaacgcgtctaaggccaccaacgacagcaacggtacaatcacgctcgacacaaactacagcacaggcatgttcggtgagaacagctctacagcgataaacgaaggaaacatcacaggtaccaacaaggaaaacatagtcggcatggcgggtaaggccacaactgtcacaaacaagaagaccatcacgttgtccgccaaaaaatctactggcatcttcggcgaggacaacagcacgctcttgaacgacaccaacggcaacatcaccgtgaaggaagagtcctccgtcggcatctactcaaagggcaacaacaagatcgctgaaaacaagggcatcatcctcgccgaaaaaaagaagtctgccggaatgttgggttcagagggcaagctggagaacagcaacagcatcaccacccaggacgaggaaagcgccggaatgtacgtcgagaacagcagcgcaacaaacaaaaaaacaatcacagctaacggcaaaaagtcagcaggcgtgtacgtgaagctggacaaggctgccggaggcaccatcgcgggtacgaacgagggaaccaacgccaccatcacgatgacgaacgagggcagcgctgccatgctgggagaagtgaagtccctcgtgaccaacaactcggccactctgacactgaccaaccaaaacagcatcgtagtgaacaccaaggaaaccgtgggcatgatgatcactaacgacaccacaggcatccctaactccaacgtcaaggccctgaacacaggcaccatcgacctgaactccggcgctaccaacaaggacaacataggaatcctggccaacaagcgggccaccggaatcaacgagaagaacatcaacgtgaactccaaatcttctgtgggaatgctggctaaagagggttccaacatcgagaacaacaccaccttcagcaccatcaacctgaaggcagaatccggcatcggaatgctggccgacggcaaagacgcctctggcaacatatccacagccctgaacaacgctcggatagttgccacttccatcggcaagagatctctgggcatgctggcgcagaacaacggaaaagtcggcaacaacaaaaacatagacatcctggccgaaaacggagtgggcatcttcgtgagcgaaaccggcgtgggagagaacaccagcactggtactatcagcctggaaaacaaggagagcgtgggtatcttcgccaagaacaacggcaccaacgacaccgctaagaacagcggcactataaacctgggaaaggctgacggaagcacctctcacgagagcctgatcggcatgttcgcccaggccgagtccggtaagacagccagcgtgaagaacaccaaagacatcaacataaacaccaaaaagagcgttggcatgtacgccaaaaacgacgcctctaacatcaccgacgtggacctggaaaacaccggtgacataaacataaactcccaagagagcgcagggatctacgcccccaagtctaacatctcaaaggtgggaaccatcaccctgaaaaactccacagtgtctaacggcagcagcgctgtgtacgtgagcaacggaggaaaggtggccgacacagcatccgcgaagatcaacctcgggaaagtgaaccagaacagagtggcttactacgtgaacggtaaggactcagcgctcgccggcgccaacatcggcaagatcacagggtacggcgtgggagtatacctgcagggcgcgtctggagacaaggccaccctggactcgaacaccagcaaactggactacaccgcccagggcacaggcaacggcatcatcggcctactgctgaagggtgaaacagacatccagagctacatcaaaggcatcaaggttggtaacacggttcctagaagcaaccccagcgacaaagacaaatacgcaataggcatatacgccgacgcccaggggaccgccggcactccctacaacatcaccacccctatcacggccggaaagtccggtgtgggcatcttcgctgacaaggacagcaacatcaactacacaggcaacatggaaatcggtgacggcaccacagccggcactggcatcttcatcacaaagaagatcggggcaacaggcgggagagtgaccctgggcagcaacactatcaagctgaagggaacgaagggtgtagtggctatcgcctctgagggtacggaattcaacggtggcaccgccacaatcgagctggagggcaaggacgtgcagggtgtgggcgtgtacggcaagaagggctccgacgtagacgtgtcccactggaacttcaacaaccacggaaactcggctgaagaagtgagaagcgaagagggcaaagtgcacatcaacggcaacaaaaacctgaaaccccggatggtgcttacacacgtgatcaacggcgaaacatcaatcgtgacggggaaaaccgtgaccagcgtaaacgacggcaccatcaccgcaaaggaaaacatcggcctgatggcggagggtatcaaaaaccacggcatgaccatctggcaggagggaaacttcgaggccgtgaaccacgggactatcgacttcagcgcagctgaaaagagcaccgctatgttcatcaactcggctcggggcaagaacgacggaacgatcaaagtgggaaagaactcaatcgggatctacggtttctacaacaaggacacccggaagtacgagggtgctcctgcctcccctgaccctaacaagttagagatcgaaaccaccagcaactctaaaatctccctgggcgacgcctctacgggaatgtacctcatcaacgccgagaaaatcgagaacaagggcggtcaaatcacctctgagtccggggctactaagaacgtgggcatctacgccgttaacggccaagacagcataaacgtgaacaacaagaacctaacaatgacgacggccgcaaacatcgccctcggcaacggatccgttgggctgtactccaagggccagtcctacacagtccggaactccgtgacaaacactggtaacatcacggttggcgacaagatgaccggctctccttcagtcgccatgtacgctgaaaacactaacctgacaaccgacagcaagatcacggttggtaaagacggcatcgccttctacggcaagaacagcgacatcacagccaagggatctgccaacttcagcaacaagggggtcctggcctacctggaaaactcaaagttcatctcccacctgggtaacctgggggccacccagaacaccatgctgtacctgaaaaactcaatagcgcagctggacggtgccggcaccaaggtggacatggacgtggccgacggctacactggcgcctacatcgagggcaacagcacattgacaggcgtgaaaacgatcaagctgggccaggactcaaccggcctcttcctgaaagacgccaacttcgtgagcaacgccgagagcatcaccgggaccaaggacaaggccagaggaatcctagcgaccaacagcaacctcactaacaacagcaaaatcttcctgagcggggccgagtctatcggcatctactcaaacgctaacaacaccaagtcggtagtcaacaacggagaactcaccatcgcaggcaagaagactctgggagtgttcctgaagggttcccagagcctggaaaacaaggcgaacatcaacatcgccgactctgccaacagcctggaacccacaatcggcatctacacggccgaaggaagcagcaacatacggcacacctctggcaccatcgacgtgggacagaaatctatcggcatatactcgacaactaactcgaacgtggagatgaacggaggtaagatccacgtgaaggaccagggcatcggaatctacaagcagaacggaaaggccactatcaagggagagttggacatcgacacgcacatcgcaaccaccaaggacagcgagcccaccggcgtgtacgcggtgaacgggacagaaatcaacgaccaggcctccaagatcagcatcggagcaaagtcatacggcttcatcctgaacaacaccgacgtgaacaacactaacatctacaacaacaccgacgctgggaccgtgaccatgggcaacgacagcgtgttcctgtactccaacggtaaggccatcatcaacaacaaaagggacatctctgcgaacaactcgaaccacctgatcgctttctacatcaaaaacggcggcgacttcacaaacaacggcactatcgacttcagcaccggtaaaggcaacatcggcatctacgcccccggcggtaaggctacaaacaagggccggatcctggtgggcgccactgacgacatcgaccctatgacaggaaaggtgtacacagacgtcagcaaaaccgtgtacggaatcggcatggccgccgacaacggcggccacatcgtgaacgaaggcgaaatcaggatctacaacaacaaaagcatcgggatgtacgggaagggggtgggcacaacagtggagaacaaagggacgatcagcctggacggcagcagagccaccgccacgaacaagatccagagcatgacaggagtttacgtggacgacggcgctacattcaaaaactacggaacaatcaccacaaccgactcttacgccggacgagacggcaaggtcaacgagaacgtgaccggtctggctggcgtggccgtgatgaacgggtctaccctggaaaaccacggcaaaatctacatagacgctgacaacagctacggcgtgctcatcagaggcaaacgggacaccaaggggaacgtggaaagatacgcagtgatcaaaaactacggggagatcaaagttcggggcaaaggcacttggggcatctcttggaaggacgtgtcccaggctgacatcgacgagctgcaaaagcagatcaactctaagatcagctctgaccctgagagacaggccctccgggaggcagagggcacggacaagaactaccagggcgtgaccatcacagtgaaggacggaaagcctaccttcctgagaaacggcgtgcctatcagcgactctgaggtagaacagatcggcaaacttatcggcaaagagtctaacctgggaatgagcgacatcgggttctacgtggacaccctgggacgaacaaagcccatcgacatcgacggcgcaaaccctccaatcaactctcagctgataatagggacagagtacagcgagaaaaccaacaaaaagcaatggttcgtgaagggagacgtgataaagcccttcctggaccagatccagggtagaaacttcaaactgacatccatcgccggcagcctgacctggatcgctacccctgtgctggacaactacggccagataaccggggtggccatggctaagctgccctacacatctttcgtgaagaagacagacaacgcctggaacttcaccgacggccttgaacagagatacgacatgaacgccctggacagcgtagagaaaagaatcttcaacaagctgaacggaatagggaaaaacgaagaggccctgctgactcaggcttacgacgagatgatgggtcaccagtacgccaacgttcagcagagaggcggaggctctcccccagaagaccctcctgatagcaagaacaccctggtgctgttcggcgctggcttcggcgccgtgatcacagtggtggtgatcgtggtcatcatcaagtgcttctgcaagcacagatcttgcttcagacggaacgaggccagcagagagacaaacaacagcctgaccttcggacctgaggaagccctggccgagcagaccgtgttcctgggcggaggctctgcctggtcccacccccaattcgagaagtgatga

SEQ ID NO: 13 - DNA, 11226 bp, Fusobacterium nucleatum
  source 1..11226: mol_type = other DNA
atggaaacagacacattgctgctatgggtcctgctgctctgggttccaggctccactggtgacgaagtgaacactgagcaaatgaaggtggtgccaacacgcgaagagatcgtctcgagcaaagagaacctgaagaactccgtcggaggactgcagaccaaaatcaacgacgccagatccgaaaacgaaaaggcgctgaaggggctgagactggagctaatacagctgatggaacagggaaaccaagtggtcaagtccccttggtcctcttggcagttcggcatgaactacttctacgaccactggggaagcgaatacaaggggcggggggacaagccccagaagtacctgttcaacggaatctacaccagaggtaactggaaagtgcggaacgccatggacgtagccgagaaccagagagttggtggaagacccctgacgcctggcaacgactctctgaacagctggaagaacgctaacaacagcagcaactccggcgtgaagatcgacagagacaacagcatctcttctagcacaaacgggaaccggagctggggcctggtggacctggaaaacctccgagaacctaccaacgaagtcgagatcctggcgagaatcagccccaaagaggtgaccaagcaggcaataagcctaaacatcacagaacctaccgtgcagaccctggaggcccctgacgtgaacccccaggtgaacgagcctctgcctgcccctgtgatagacctgcccgaagtagaaacggtgaccatcaaccctctgactatcaacgctcctgacgctcctaccgcgccttctgcgcctacaatcaacatcggcataacagcccccagcgcgcctagcgcccctaccatcaacgtggtgcccaccagcccctccacacctagcgcccctacgatcaacatcggcatccaacctcctagcatcacccctctgagcatcaccacgcctgacagcgttgacgccccaaacgtcgtatctccgcagatcaagccggtcgacttcacagtggaccctggcggggacagcaacgcttactctagcgagaagcacaacagccaccagggctggaaggccagctggtccaagaccatcaacgtgacagagctgaccaaccggaactacgtgtccctgacaagagacaccgctgactcgaccatcccaacagaccaggtgataaacgtgaccaaagagaacaacagagccatggtggttgacgaggtgagaaagaacgggatcgtagtggacttcaagggcaccatcaacctgcagagaagccagaacgtgggcatcgacctgcaaggtacacaccagggcagcaagagcgacccactgatcgccaacatctacaactccggaaagatcatcggcaacgccaaatacggaagcacggccaacaaggagcagatcgccttcggattcaacaacgccgacggctccaacaacacgaccatgaccaacatggtgaacaaaggagagataacactgaacgcgccttcctccgccggtatccaactgaagcctgaagacccccacgactggcagcctaactcttggaacgccgcgccactgcaaatcgacaacaagacgcccaacaaaatcaagggcagagtgctgatgaaggctgacaaccagaaagacataaacctgaacggctcaggcagcttcggcatggtcaccgtgttcaacgagggcgtacccaagagactgttcgcacccagctacgtaacaaactacgagaacttgcggtccgagcggacatacgacggcgagagagtgctgccaggcggcgagatcggccggagcgctctgtctgactctaaatacacatccggcgtgtacaacaccggcaacatcaacatcaacggtgacagctctatcggcgtgggcctgctgcaggagatacaggaggtgaagctcgccgggaacatcaacataggcaccaaggctgttacacaggagactggcatcagcaacctgcccaacgccgggtcgaaaacctacagcatcaacaaggtcgaagaggccgtgggagtgttcgccggcgtccctacgatgcctgtgaagcctggcgagacagacaccctgatcaacggctctggcgcaagaaacacagccacttccttggtgggcaccgagacagtggagatcaacggaaacatcagcctcggcgagcacgcgacccagtcaatcggcgccctggtgggcgacacggaagtggacctcaacaagggtcagctgaccgagaacggcgtaaacaaaggctctaacgccgacagaaagctgaagagaagcggggacatcacagcaaagagcaacagcatcatcaacgtgggcggaaaaaagaactacggattcgtggtgtctaactcagcccacagcagcaagttcggcacaaccgtggacagcctcgagtacaaggtggacaaaacccaccacggaaaaggcatcaacgaaggcaaaatcaacgtaacgggcgacgagtccgttggtttcgccatgatcaagggaggcgacagcaagagcagcggcatcatctctgtaggcaacaacgcggagaactccatcggcttctacggcaaggaggactccttcaccaacagcgggacaatagaggtgacgagcgcaaagaagaagaacaaggccgtagtgctggacgggacaaacgcttctaacaagatcaacttcaccaacaccggtaacatatacgtcaacactagcgacaacggaaacaagaacttggacggggacggcaacatcggtatctacgcccaaggtaactacaaaatcgagcacaacagcggcatcgtcaaggccggaaaggacgccatcgccttctacgtgaaaaactcaacaggagaagtgaacatcaacgcccctatcgagctggctaacagcaacaaggcaactactatcgggatctacagcgacggcgacgccaaggtaaaattcggggccagctcctcacttaagatcggggaaaaggctgtggggctctacagcgccgaccccacaaagttcaacaacacattcgaaatcgaaaccggcaagacactgaacgtggagctaggtaagaacagcacattcggccttctgaacggcaacaaaaacgttactaactccccactgctgtcaaagtacctgaacaacaacaccacggacaagatcaacatcaccaagttcgacgaaggcgcctccctgttctacgccacactgaaggccaaggccatcctggacgaggactacaaggtgacaaacgctgacgccgctagcacctctgtcctagtggccaacgacggggccaacgtggagatcgccagcgggaagaagctggaaaccaacacaaacgtgggcctggtggccaccaagggggctggcgcctctctgagcacctcagttgcggaaaacaaggggacccttatctctactcggacagacaagggcatcggcatctacacgtacacagccaacggtgagaacagcggaaccatcatcatgaaaaaccagaactccgttgggatactgggctccggaggatccaacctgaagaacacagggaagatcgagctggaagctatcagcagcgccggcgtgtacgccgaaaacagcaacatgatcaacagcgggacagcatcagagatcgtagtgaaaaagaaggcgtccgtgggcatctacgcccgcgaaacaagcatcagctctgtgccaaagaacgtgaaaaacgaggggaaaatcgagataaaagccgacggcgacgggaaatccgccggcatctactcgaagaaggagggcggcgccaaactgaccatcgaaaacacggggaacatcgaggtcgctcaaaaagcatcggccggcatctacgcgaaaaacgaatctaaccaggccaacacagagtctgtcgtgaccaacagcggcttaatcaagatgagcgccgagaacagcatcggcatcatgggcgaaaagagcaaggtagaaaactcaggtaccggaacaaaggggatcgagatcgccggaaaaaagagcgcaggcatcctggtgacaaaggaatctgaagtggtgaactccggcaggatccttctggccaacaactcaatcctggcgagctctgacggcctcgttggcatcagcgttgacggcagcagcacgggcgagaacgacgcctcaggagagatcaagatcgacgccgcctactctacaggaatgctctcttctggaggcgacatcaccaacgcaggaaaaatcgacctggaaaaaaaggaatctataggcatctacgccacaaacgccaacgtgacaaacaacggggctaccacgaaaggcatcttcatcaaggacgaaaagagcgttggcatctacagcaagatcaacagctctagcacggccgacaagatcgtcacaaactctggtaccatcgacataggcggaacaagcaagaccgggtccgcgggcatctactctatcgtggagaacggagctactaagagactgagcacggtatcctcggggaacatcaccatctctcagaaggagtcagtgggtatctacgccaagaacaaatcaagccaggccaacatcgagtctgttgttacaaactcagggaacggcaagatcgaggtcaagaacgagggctctgccggcatcctggtggaaaagagcaaggttaccaacacagctgtaggcaccaacggcataatcgtgagcgccaagaagtctgccggaataatcgggaagctgggcagcgaaatcatcaactcaggcataatcaagactgaaacagccacaccaacggccgccgccgacggtgtcgtcggcatcagcctgaacgcgtctaaggccaccaacgacagcaacggtacaatcacgctcgacacaaactacagcacaggcatgttcggtgagaacagctctacagcgataaacgaaggaaacatcacaggtaccaacaaggaaaacatagtcggcatggcgggtaaggccacaactgtcacaaacaagaagaccatcacgttgtccgccaaaaaatctactggcatcttcggcgaggacaacagcacgctcttgaacgacaccaacggcaacatcaccgtgaaggaagagtcctccgtcggcatctactcaaagggcaacaacaagatcgctgaaaacaagggcatcatcctcgccgaaaaaaagaagtctgccggaatgttgggttcagagggcaagctggagaacagcaacagcatcaccacccaggacgaggaaagcgccggaatgtacgtcgagaacagcagcgcaacaaacaaaaaaacaatcacagctaacggcaaaaagtcagcaggcgtgtacgtgaagctggacaaggctgccggaggcaccatcgcgggtacgaacgagggaaccaacgccaccatcacgatgacgaacgagggcagcgctgccatgctgggagaagtgaagtccctcgtgaccaacaactcggccactctgacactgaccaaccaaaacagcatcgtagtgaacaccaaggaaaccgtgggcatgatgatcactaacgacaccacaggcatccctaactccaacgtcaaggccctgaacacaggcaccatcgacctgaactccggcgctaccaacaaggacaacataggaatcctggccaacaagcgggccaccggaatcaacgagaagaacatcaacgtgaactccaaatcttctgtgggaatgctggctaaagagggttccaacatcgagaacaacaccaccttcagcaccatcaacctgaaggcagaatccggcatcggaatgctggccgacggcaaagacgcctctggcaacatatccacagccctgaacaacgctcggatagttgccacttccatcggcaagagatctctgggcatgctggcgcagaacaacggaaaagtcggcaacaacaaaaacatagacatcctggccgaaaacggagtgggcatcttcgtgagcgaaaccggcgtgggagagaacaccagcactggtactatcagcctggaaaacaaggagagcgtgggtatcttcgccaagaacaacggcaccaacgacaccgctaagaacagcggcactataaacctgggaaaggctgacggaagcacctctcacgagagcctgatcggcatgttcgcccaggccgagtccggtaagacagccagcgtgaagaacaccaaagacatcaacataaacaccaaaaagagcgttggcatgtacgccaaaaacgacgcctctaacatcaccgacgtggacctggaaaacaccggtgacataaacataaactcccaagagagcgcagggatctacgcccccaagtctaacatctcaaaggtgggaaccatcaccctgaaaaactccacagtgtctaacggcagcagcgctgtgtacgtgagcaacggaggaaaggtggccgacacagcatccgcgaagatcaacctcgggaaagtgaaccagaacagagtggcttactacgtgaacggtaaggactcagcgctcgccggcgccaacatcggcaagatcacagggtacggcgtgggagtatacctgcagggcgcgtctggagacaaggccaccctggactcgaacaccagcaaactggactacaccgcccagggcacaggcaacggcatcatcggcctactgctgaagggtgaaacagacatccagagctacatcaaaggcatcaaggttggtaacacggttcctagaagcaaccccagcgacaaagacaaatacgcaataggcatatacgccgacgcccaggggaccgccggcactccctacaacatcaccacccctatcacggccggaaagtccggtgtgggcatcttcgctgacaaggacagcaacatcaactacacaggcaacatggaaatcggtgacggcaccacagccggcactggcatcttcatcacaaagaagatcggggcaacaggcgggagagtgaccctgggcagcaacactatcaagctgaagggaacgaagggtgtagtggctatcgcctctgagggtacggaattcaacggtggcaccgccacaatcgagctggagggcaaggacgtgcagggtgtgggcgtgtacggcaagaagggctccgacgtagacgtgtcccactggaacttcaacaaccacggaaactcggctgaagaagtgagaagcgaagagggcaaagtgcacatcaacggcaacaaaaacctgaaaccccggatggtgcttacacacgtgatcaacggcgaaacatcaatcgtgacggggaaaaccgtgaccagcgtaaacgacggcaccatcaccgcaaaggaaaacatcggcctgatggcggagggtatcaaaaaccacggcatgaccatctggcaggagggaaacttcgaggccgtgaaccacgggactatcgacttcagcgcagctgaaaagagcaccgctatgttcatcaactcggctcggggcaagaacgacggaacgatcaaagtgggaaagaactcaatcgggatctacggtttctacaacaaggacacccggaagtacgagggtgctcctgcctcccctgaccctaacaagttagagatcgaaaccaccagcaactctaaaatctccctgggcgacgcctctacgggaatgtacctcatcaacgccgagaaaatcgagaacaagggcggtcaaatcacctctgagtccggggctactaagaacgtgggcatctacgccgttaacggccaagacagcataaacgtgaacaacaagaacctaacaatgacgacggccgcaaacatcgccctcggcaacggatccgttgggctgtactccaagggccagtcctacacagtccggaactccgtgacaaacactggtaacatcacggttggcgacaagatgaccggctctccttcagtcgccatgtacgctgaaaacactaacctgacaaccgacagcaagatcacggttggtaaagacggcatcgccttctacggcaagaacagcgacatcacagccaagggatctgccaacttcagcaacaagggggtcctggcctacctggaaaactcaaagttcatctcccacctgggtaacctgggggccacccagaacaccatgctgtacctgaaaaactcaatagcgcagctggacggtgccggcaccaaggtggacatggacgtggccgacggctacactggcgcctacatcgagggcaacagcacattgacaggcgtgaaaacgatcaagctgggccaggactcaaccggcctcttcctgaaagacgccaacttcgtgagcaacgccgagagcatcaccgggaccaaggacaaggccagaggaatcctagcgaccaacagcaacctcactaacaacagcaaaatcttcctgagcggggccgagtctatcggcatctactcaaacgctaacaacaccaagtcggtagtcaacaacggagaactcaccatcgcaggcaagaagactctgggagtgttcctgaagggttcccagagcctggaaaacaaggcgaacatcaacatcgccgactctgccaacagcctggaacccacaatcggcatctacacggccgaaggaagcagcaacatacggcacacctctggcaccatcgacgtgggacagaaatctatcggcatatactcgacaactaactcgaacgtggagatgaacggaggtaagatccacgtgaaggaccagggcatcggaatctacaagcagaacggaaaggccactatcaagggagagttggacatcgacacgcacatcgcaaccaccaaggacagcgagcccaccggcgtgtacgcggtgaacgggacagaaatcaacgaccaggcctccaagatcagcatcggagcaaagtcatacggcttcatcctgaacaacaccgacgtgaacaacactaacatctacaacaacaccgacgctgggaccgtgaccatgggcaacgacagcgtgttcctgtactccaacggtaaggccatcatcaacaacaaaagggacatctctgcgaacaactcgaaccacctgatcgctttctacatcaaaaacggcggcgacttcacaaacaacggcactatcgacttcagcaccggtaaaggcaacatcggcatctacgcccccggcggtaaggctacaaacaagggccggatcctggtgggcgccactgacgacatcgaccctatgacaggaaaggtgtacacagacgtcagcaaaaccgtgtacggaatcggcatggccgccgacaacggcggccacatcgtgaacgaaggcgaaatcaggatctacaacaacaaaagcatcgggatgtacgggaagggggtgggcacaacagtggagaacaaagggacgatcagcctggacggcagcagagccaccgccacgaacaagatccagagcatgacaggagtttacgtggacgacggcgctacattcaaaaactacggaacaatcaccacaaccgactcttacgccggacgagacggcaaggtcaacgagaacgtgaccggtctggctggcgtggccgtgatgaacgggtctaccctggaaaaccacggcaaaatctacatagacgctgacaacagctacggcgtgctcatcagaggcaaacgggacaccaaggggaacgtggaaagatacgcagtgatcaaaaactacggggagatcaaagttcggggcaaaggcacttggggcatctcttggaaggacgtgtcccaggctgacatcgacgagctgcaaaagcagatcaactctaagatcagctctgaccctgagagacaggccctccgggaggcagagggcacggacaagaactaccagggcgtgaccatcacagtgaaggacggaaagcctaccttcctgagaaacggcgtgcctatcagcgactctgaggtagaacagatcggcaaacttatcggcaaagagtctaacctgggaatgagcgacatcgggttctacgtggacaccctgggacgaacaaagcccatcgacatcgacggcgcaaaccctccaatcaactctcagctgataatagggacagagtacagcgagaaaaccaacaaaaagcaatggttcgtgaagggagacgtgataaagcccttcctggaccagatccagggtagaaacttcaaactgacatccatcgccggcagcctgacctggatcgctacccctgtgctggacaactacggccagataaccggggtggccatggctaagctgccctacacatctttcgtgaagaagacagacaacgcctggaacttcaccgacggccttgaacagagatacgacatgaacgccctggacagcgtagagaaaagaatcttcaacaagctgaacggaatagggaaaaacgaagaggccctgctgactcaggcttacgacgagatgatgggtcaccagtacgccaacgttcagcagagaggcggaggctctggaggagggtccggagggggctcaccagccgccgccgaagaaaaggccgcccctgccgccgctaaacctgctacaaccgagggcgagttccccgagacacgggagaagatgagcggcatccgcagagccatcgccaaggccatggtgcacagcaaacacaccgcccctcacgttacactgatggacgaggccgacgtgaccaagctggtcgcccaccggaagaagttcaaggccatcgccgccgagaaaggcatcaaactgaccttcctgccttacgtggtgaaggccctggtgtccgccctcagagaataccccgtgctgaacaccagcatcgacgacgaaaccgaggaaatcatccagaagcactactacaacatcggcatcgcggctgacaccgacagaggcctgctggtgccagtgatcaagcacgccgacagaaagcccatcttcgccctggcccaggagatcaatgagctggctgaaaaagccagagacggaaagctgacacctggcgagatgaagggcgcttcttgcaccatcacaaacatcggaagcgccggcggacagtggttcacccctgtgatcaaccaccctgaggtggccatcctgggcatcggcagaatcgccgagaagcctatcgtgcgggacggcgaaatcgtggctgctcctatgctggccctgagcctgtctttcgaccacagaatgatcgacggcgccaccgcccaaaaggcacttaaccacatcaagcggctgctgagcgaccccgagctgctgctgatggaagcctgatga

SEQ ID NO: 14 - DNA, 10983 bp, Fusobacterium nucleatum
  source 1..10983: mol_type = other DNA
atggaaacagacacattgctgctatgggtcctgctgctctgggttccaggctccactggtgacgaagtgaacactgagcaaatgaaggtggtgccaacacgcgaagagatcgtctcgagcaaagagaacctgaagaactccgtcggaggactgcagaccaaaatcaacgacgccagatccgaaaacgaaaaggcgctgaaggggctgagactggagctaatacagctgatggaacagggaaaccaagtggtcaagtccccttggtcctcttggcagttcggcatgaactacttctacgaccactggggaagcgaatacaaggggcggggggacaagccccagaagtacctgttcaacggaatctacaccagaggtaactggaaagtgcggaacgccatggacgtagccgagaaccagagagttggtggaagacccctgacgcctggcaacgactctctgaacagctggaagaacgctaacaacagcagcaactccggcgtgaagatcgacagagacaacagcatctcttctagcacaaacgggaaccggagctggggcctggtggacctggaaaacctccgagaacctaccaacgaagtcgagatcctggcgagaatcagccccaaagaggtgaccaagcaggcaataagcctaaacatcacagaacctaccgtgcagaccctggaggcccctgacgtgaacccccaggtgaacgagcctctgcctgcccctgtgatagacctgcccgaagtagaaacggtgaccatcaaccctctgactatcaacgctcctgacgctcctaccgcgccttctgcgcctacaatcaacatcggcataacagcccccagcgcgcctagcgcccctaccatcaacgtggtgcccaccagcccctccacacctagcgcccctacgatcaacatcggcatccaacctcctagcatcacccctctgagcatcaccacgcctgacagcgttgacgccccaaacgtcgtatctccgcagatcaagccggtcgacttcacagtggaccctggcggggacagcaacgcttactctagcgagaagcacaacagccaccagggctggaaggccagctggtccaagaccatcaacgtgacagagctgaccaaccggaactacgtgtccctgacaagagacaccgctgactcgaccatcccaacagaccaggtgataaacgtgaccaaagagaacaacagagccatggtggttgacgaggtgagaaagaacgggatcgtagtggacttcaagggcaccatcaacctgcagagaagccagaacgtgggcatcgacctgcaaggtacacaccagggcagcaagagcgacccactgatcgccaacatctacaactccggaaagatcatcggcaacgccaaatacggaagcacggccaacaaggagcagatcgccttcggattcaacaacgccgacggctccaacaacacgaccatgaccaacatggtgaacaaaggagagataacactgaacgcgccttcctccgccggtatccaactgaagcctgaagacccccacgactggcagcctaactcttggaacgccgcgccactgcaaatcgacaacaagacgcccaacaaaatcaagggcagagtgctgatgaaggctgacaaccagaaagacataaacctgaacggctcaggcagcttcggcatggtcaccgtgttcaacgagggcgtacccaagagactgttcgcacccagctacgtaacaaactacgagaacttgcggtccgagcggacatacgacggcgagagagtgctgccaggcggcgagatcggccggagcgctctgtctgactctaaatacacatccggcgtgtacaacaccggcaacatcaacatcaacggtgacagctctatcggcgtgggcctgctgcaggagatacaggaggtgaagctcgccgggaacatcaacataggcaccaaggctgttacacaggagactggcatcagcaacctgcccaacgccgggtcgaaaacctacagcatcaacaaggtcgaagaggccgtgggagtgttcgccggcgtccctacgatgcctgtgaagcctggcgagacagacaccctgatcaacggctctggcgcaagaaacacagccacttccttggtgggcaccgagacagtggagatcaacggaaacatcagcctcggcgagcacgcgacccagtcaatcggcgccctggtgggcgacacggaagtggacctcaacaagggtcagctgaccgagaacggcgtaaacaaaggctctaacgccgacagaaagctgaagagaagcggggacatcacagcaaagagcaacagcatcatcaacgtgggcggaaaaaagaactacggattcgtggtgtctaactcagcccacagcagcaagttcggcacaaccgtggacagcctcgagtacaaggtggacaaaacccaccacggaaaaggcatcaacgaaggcaaaatcaacgtaacgggcgacgagtccgttggtttcgccatgatcaagggaggcgacagcaagagcagcggcatcatctctgtaggcaacaacgcggagaactccatcggcttctacggcaaggaggactccttcaccaacagcgggacaatagaggtgacgagcgcaaagaagaagaacaaggccgtagtgctggacgggacaaacgcttctaacaagatcaacttcaccaacaccggtaacatatacgtcaacactagcgacaacggaaacaagaacttggacggggacggcaacatcggtatctacgcccaaggtaactacaaaatcgagcacaacagcggcatcgtcaaggccggaaaggacgccatcgccttctacgtgaaaaactcaacaggagaagtgaacatcaacgcccctatcgagctggctaacagcaacaaggcaactactatcgggatctacagcgacggcgacgccaaggtaaaattcggggccagctcctcacttaagatcggggaaaaggctgtggggctctacagcgccgaccccacaaagttcaacaacacattcgaaatcgaaaccggcaagacactgaacgtggagctaggtaagaacagcacattcggccttctgaacggcaacaaaaacgttactaactccccactgctgtcaaagtacctgaacaacaacaccacggacaagatcaacatcaccaagttcgacgaaggcgcctccctgttctacgccacactgaaggccaaggccatcctggacgaggactacaaggtgacaaacgctgacgccgctagcacctctgtcctagtggccaacgacggggccaacgtggagatcgccagcgggaagaagctggaaaccaacacaaacgtgggcctggtggccaccaagggggctggcgcctctctgagcacctcagttgcggaaaacaaggggacccttatctctactcggacagacaagggcatcggcatctacacgtacacagccaacggtgagaacagcggaaccatcatcatgaaaaaccagaactccgttgggatactgggctccggaggatccaacctgaagaacacagggaagatcgagctggaagctatcagcagcgccggcgtgtacgccgaaaacagcaacatgatcaacagcgggacagcatcagagatcgtagtgaaaaagaaggcgtccgtgggcatctacgcccgcgaaacaagcatcagctctgtgccaaagaacgtgaaaaacgaggggaaaatcgagataaaagccgacggcgacgggaaatccgccggcatctactcgaagaaggagggcggcgccaaactgaccatcgaaaacacggggaacatcgaggtcgctcaaaaagcatcggccggcatctacgcgaaaaacgaatctaaccaggccaacacagagtctgtcgtgaccaacagcggcttaatcaagatgagcgccgagaacagcatcggcatcatgggcgaaaagagcaaggtagaaaactcaggtaccggaacaaaggggatcgagatcgccggaaaaaagagcgcaggcatcctggtgacaaaggaatctgaagtggtgaactccggcaggatccttctggccaacaactcaatcctggcgagctctgacggcctcgttggcatcagcgttgacggcagcagcacgggcgagaacgacgcctcaggagagatcaagatcgacgccgcctactctacaggaatgctctcttctggaggcgacatcaccaacgcaggaaaaatcgacctggaaaaaaaggaatctataggcatctacgccacaaacgccaacgtgacaaacaacggggctaccacgaaaggcatcttcatcaaggacgaaaagagcgttggcatctacagcaagatcaacagctctagcacggccgacaagatcgtcacaaactctggtaccatcgacataggcggaacaagcaagaccgggtccgcgggcatctactctatcgtggagaacggagctactaagagactgagcacggtatcctcggggaacatcaccatctctcagaaggagtcagtgggtatctacgccaagaacaaatcaagccaggccaacatcgagtctgttgttacaaactcagggaacggcaagatcgaggtcaagaacgagggctctgccggcatcctggtggaaaagagcaaggttaccaacacagctgtaggcaccaacggcataatcgtgagcgccaagaagtctgccggaataatcgggaagctgggcagcgaaatcatcaactcaggcataatcaagactgaaacagccacaccaacggccgccgccgacggtgtcgtcggcatcagcctgaacgcgtctaaggccaccaacgacagcaacggtacaatcacgctcgacacaaactacagcacaggcatgttcggtgagaacagctctacagcgataaacgaaggaaacatcacaggtaccaacaaggaaaacatagtcggcatggcgggtaaggccacaactgtcacaaacaagaagaccatcacgttgtccgccaaaaaatctactggcatcttcggcgaggacaacagcacgctcttgaacgacaccaacggcaacatcaccgtgaaggaagagtcctccgtcggcatctactcaaagggcaacaacaagatcgctgaaaacaagggcatcatcctcgccgaaaaaaagaagtctgccggaatgttgggttcagagggcaagctggagaacagcaacagcatcaccacccaggacgaggaaagcgccggaatgtacgtcgagaacagcagcgcaacaaacaaaaaaacaatcacagctaacggcaaaaagtcagcaggcgtgtacgtgaagctggacaaggctgccggaggcaccatcgcgggtacgaacgagggaaccaacgccaccatcacgatgacgaacgagggcagcgctgccatgctgggagaagtgaagtccctcgtgaccaacaactcggccactctgacactgaccaaccaaaacagcatcgtagtgaacaccaaggaaaccgtgggcatgatgatcactaacgacaccacaggcatccctaactccaacgtcaaggccctgaacacaggcaccatcgacctgaactccggcgctaccaacaaggacaacataggaatcctggccaacaagcgggccaccggaatcaacgagaagaacatcaacgtgaactccaaatcttctgtgggaatgctggctaaagagggttccaacatcgagaacaacaccaccttcagcaccatcaacctgaaggcagaatccggcatcggaatgctggccgacggcaaagacgcctctggcaacatatccacagccctgaacaacgctcggatagttgccacttccatcggcaagagatctctgggcatgctggcgcagaacaacggaaaagtcggcaacaacaaaaacatagacatcctggccgaaaacggagtgggcatcttcgtgagcgaaaccggcgtgggagagaacaccagcactggtactatcagcctggaaaacaaggagagcgtgggtatcttcgccaagaacaacggcaccaacgacaccgctaagaacagcggcactataaacctgggaaaggctgacggaagcacctctcacgagagcctgatcggcatgttcgcccaggccgagtccggtaagacagccagcgtgaagaacaccaaagacatcaacataaacaccaaaaagagcgttggcatgtacgccaaaaacgacgcctctaacatcaccgacgtggacctggaaaacaccggtgacataaacataaactcccaagagagcgcagggatctacgcccccaagtctaacatctcaaaggtgggaaccatcaccctgaaaaactccacagtgtctaacggcagcagcgctgtgtacgtgagcaacggaggaaaggtggccgacacagcatccgcgaagatcaacctcgggaaagtgaaccagaacagagtggcttactacgtgaacggtaaggactcagcgctcgccggcgccaacatcggcaagatcacagggtacggcgtgggagtatacctgcagggcgcgtctggagacaaggccaccctggactcgaacaccagcaaactggactacaccgcccagggcacaggcaacggcatcatcggcctactgctgaagggtgaaacagacatccagagctacatcaaaggcatcaaggttggtaacacggttcctagaagcaaccccagcgacaaagacaaatacgcaataggcatatacgccgacgcccaggggaccgccggcactccctacaacatcaccacccctatcacggccggaaagtccggtgtgggcatcttcgctgacaaggacagcaacatcaactacacaggcaacatggaaatcggtgacggcaccacagccggcactggcatcttcatcacaaagaagatcggggcaacaggcgggagagtgaccctgggcagcaacactatcaagctgaagggaacgaagggtgtagtggctatcgcctctgagggtacggaattcaacggtggcaccgccacaatcgagctggagggcaaggacgtgcagggtgtgggcgtgtacggcaagaagggctccgacgtagacgtgtcccactggaacttcaacaaccacggaaactcggctgaagaagtgagaagcgaagagggcaaagtgcacatcaacggcaacaaaaacctgaaaccccggatggtgcttacacacgtgatcaacggcgaaacatcaatcgtgacggggaaaaccgtgaccagcgtaaacgacggcaccatcaccgcaaaggaaaacatcggcctgatggcggagggtatcaaaaaccacggcatgaccatctggcaggagggaaacttcgaggccgtgaaccacgggactatcgacttcagcgcagctgaaaagagcaccgctatgttcatcaactcggctcggggcaagaacgacggaacgatcaaagtgggaaagaactcaatcgggatctacggtttctacaacaaggacacccggaagtacgagggtgctcctgcctcccctgaccctaacaagttagagatcgaaaccaccagcaactctaaaatctccctgggcgacgcctctacgggaatgtacctcatcaacgccgagaaaatcgagaacaagggcggtcaaatcacctctgagtccggggctactaagaacgtgggcatctacgccgttaacggccaagacagcataaacgtgaacaacaagaacctaacaatgacgacggccgcaaacatcgccctcggcaacggatccgttgggctgtactccaagggccagtcctacacagtccggaactccgtgacaaacactggtaacatcacggttggcgacaagatgaccggctctccttcagtcgccatgtacgctgaaaacactaacctgacaaccgacagcaagatcacggttggtaaagacggcatcgccttctacggcaagaacagcgacatcacagccaagggatctgccaacttcagcaacaagggggtcctggcctacctggaaaactcaaagttcatctcccacctgggtaacctgggggccacccagaacaccatgctgtacctgaaaaactcaatagcgcagctggacggtgccggcaccaaggtggacatggacgtggccgacggctacactggcgcctacatcgagggcaacagcacattgacaggcgtgaaaacgatcaagctgggccaggactcaaccggcctcttcctgaaagacgccaacttcgtgagcaacgccgagagcatcaccgggaccaaggacaaggccagaggaatcctagcgaccaacagcaacctcactaacaacagcaaaatcttcctgagcggggccgagtctatcggcatctactcaaacgctaacaacaccaagtcggtagtcaacaacggagaactcaccatcgcaggcaagaagactctgggagtgttcctgaagggttcccagagcctggaaaacaaggcgaacatcaacatcgccgactctgccaacagcctggaacccacaatcggcatctacacggccgaaggaagcagcaacatacggcacacctctggcaccatcgacgtgggacagaaatctatcggcatatactcgacaactaactcgaacgtggagatgaacggaggtaagatccacgtgaaggaccagggcatcggaatctacaagcagaacggaaaggccactatcaagggagagttggacatcgacacgcacatcgcaaccaccaaggacagcgagcccaccggcgtgtacgcggtgaacgggacagaaatcaacgaccaggcctccaagatcagcatcggagcaaagtcatacggcttcatcctgaacaacaccgacgtgaacaacactaacatctacaacaacaccgacgctgggaccgtgaccatgggcaacgacagcgtgttcctgtactccaacggtaaggccatcatcaacaacaaaagggacatctctgcgaacaactcgaaccacctgatcgctttctacatcaaaaacggcggcgacttcacaaacaacggcactatcgacttcagcaccggtaaaggcaacatcggcatctacgcccccggcggtaaggctacaaacaagggccggatcctggtgggcgccactgacgacatcgaccctatgacaggaaaggtgtacacagacgtcagcaaaaccgtgtacggaatcggcatggccgccgacaacggcggccacatcgtgaacgaaggcgaaatcaggatctacaacaacaaaagcatcgggatgtacgggaagggggtgggcacaacagtggagaacaaagggacgatcagcctggacggcagcagagccaccgccacgaacaagatccagagcatgacaggagtttacgtggacgacggcgctacattcaaaaactacggaacaatcaccacaaccgactcttacgccggacgagacggcaaggtcaacgagaacgtgaccggtctggctggcgtggccgtgatgaacgggtctaccctggaaaaccacggcaaaatctacatagacgctgacaacagctacggcgtgctcatcagaggcaaacgggacaccaaggggaacgtggaaagatacgcagtgatcaaaaactacggggagatcaaagttcggggcaaaggcacttggggcatctcttggaaggacgtgtcccaggctgacatcgacgagctgcaaaagcagatcaactctaagatcagctctgaccctgagagacaggccctccgggaggcagagggcacggacaagaactaccagggcgtgaccatcacagtgaaggacggaaagcctaccttcctgagaaacggcgtgcctatcagcgactctgaggtagaacagatcggcaaacttatcggcaaagagtctaacctgggaatgagcgacatcgggttctacgtggacaccctgggacgaacaaagcccatcgacatcgacggcgcaaaccctccaatcaactctcagctgataatagggacagagtacagcgagaaaaccaacaaaaagcaatggttcgtgaagggagacgtgataaagcccttcctggaccagatccagggtagaaacttcaaactgacatccatcgccggcagcctgacctggatcgctacccctgtgctggacaactacggccagataaccggggtggccatggctaagctgccctacacatctttcgtgaagaagacagacaacgcctggaacttcaccgacggccttgaacagagatacgacatgaacgccctggacagcgtagagaaaagaatcttcaacaagctgaacggaatagggaaaaacgaagaggccctgctgactcaggcttacgacgagatgatgggtcaccagtacgccaacgttcagcagagaggcggaggctctggaggagggtccggagggggctcagaaagccaggtgcggcagcagttcagcaaagatatcattaagctgctgaacgagcaagtgaacaaggaaatgaacagcagcaacctgtacatgtctatgagctcttggtgctacacccacagcctggacggcgccggcctgttcctgttcgaccacgccgctgaagaatacgagcacgctaaaaagctgatcatcttcctgaacgaaaacaacgtgcccgtgcagctgaccagcatctccgcccctgagcacaagttcgagggcctcacccagatcttccagaaggcctacgagcacgaacaacacatcagcgagagcatcaacaacatcgtggaccacgccatcaagtccaaggaccacgccacattcaacttcctgcagtggtacgtcgccgagcagcacgaggaagaggtgctgttcaaggacatcctggacaagatcgagctgatcggaaacgagaaccacggcctgtacctggccgaccagtacgtgaagggcatcgccaaaagcagaaagagctgatga

SEQ ID NO: 15 - DNA, 10545 bp, Fusobacterium nucleatum
  source 1..10545: mol_type = other DNA
atggaaacagacacattgctgctatgggtcctgctgctctgggttccaggctccactggtgacgaagtgaacactgagcaaatgaaggtggtgccaacacgcgaagagatcgtctcgagcaaagagaacctgaagaactccgtcggaggactgcagaccaaaatcaacgacgccagatccgaaaacgaaaaggcgctgaaggggctgagactggagctaatacagctgatggaacagggaaaccaagtggtcaagtccccttggtcctcttggcagttcggcatgaactacttctacgaccactggggaagcgaatacaaggggcggggggacaagccccagaagtacctgttcaacggaatctacaccagaggtaactggaaagtgcggaacgccatggacgtagccgagaaccagagagttggtggaagacccctgacgcctggcaacgactctctgaacagctggaagaacgctaacaacagcagcaactccggcgtgaagatcgacagagacaacagcatctcttctagcacaaacgggaaccggagctggggcctggtggacctggaaaacctccgagaacctaccaacgaagtcgagatcctggcgagaatcagccccaaagaggtgaccaagcaggcaataagcctaaacatcacagaacctaccgtgcagaccctggaggcccctgacgtgaacccccaggtgaacgagcctctgcctgcccctgtgatagacctgcccgaagtagaaacggtgaccatcaaccctctgactatcaacgctcctgacgctcctaccgcgccttctgcgcctacaatcaacatcggcataacagcccccagcgcgcctagcgcccctaccatcaacgtggtgcccaccagcccctccacacctagcgcccctacgatcaacatcggcatccaacctcctagcatcacccctctgagcatcaccacgcctgacagcgttgacgccccaaacgtcgtatctccgcagatcaagccggtcgacttcacagtggaccctggcggggacagcaacgcttactctagcgagaagcacaacagccaccagggctggaaggccagctggtccaagaccatcaacgtgacagagctgaccaaccggaactacgtgtccctgacaagagacaccgctgactcgaccatcccaacagaccaggtgataaacgtgaccaaagagaacaacagagccatggtggttgacgaggtgagaaagaacgggatcgtagtggacttcaagggcaccatcaacctgcagagaagccagaacgtgggcatcgacctgcaaggtacacaccagggcagcaagagcgacccactgatcgccaacatctacaactccggaaagatcatcggcaacgccaaatacggaagcacggccaacaaggagcagatcgccttcggattcaacaacgccgacggctccaacaacacgaccatgaccaacatggtgaacaaaggagagataacactgaacgcgccttcctccgccggtatccaactgaagcctgaagacccccacgactggcagcctaactcttggaacgccgcgccactgcaaatcgacaacaagacgcccaacaaaatcaagggcagagtgctgatgaaggctgacaaccagaaagacataaacctgaacggctcaggcagcttcggcatggtcaccgtgttcaacgagggcgtacccaagagactgttcgcacccagctacgtaacaaactacgagaacttgcggtccgagcggacatacgacggcgagagagtgctgccaggcggcgagatcggccggagcgctctgtctgactctaaatacacatccggcgtgtacaacaccggcaacatcaacatcaacggtgacagctctatcggcgtgggcctgctgcaggagatacaggaggtgaagctcgccgggaacatcaacataggcaccaaggctgttacacaggagactggcatcagcaacctgcccaacgccgggtcgaaaacctacagcatcaacaaggtcgaagaggccgtgggagtgttcgccggcgtccctacgatgcctgtgaagcctggcgagacagacaccctgatcaacggctctggcgcaagaaacacagccacttccttggtgggcaccgagacagtggagatcaacggaaacatcagcctcggcgagcacgcgacccagtcaatcggcgccctggtgggcgacacggaagtggacctcaacaagggtcagctgaccgagaacggcgtaaacaaaggctctaacgccgacagaaagctgaagagaagcggggacatcacagcaaagagcaacagcatcatcaacgtgggcggaaaaaagaactacggattcgtggtgtctaactcagcccacagcagcaagttcggcacaaccgtggacagcctcgagtacaaggtggacaaaacccaccacggaaaaggcatcaacgaaggcaaaatcaacgtaacgggcgacgagtccgttggtttcgccatgatcaagggaggcgacagcaagagcagcggcatcatctctgtaggcaacaacgcggagaactccatcggcttctacggcaaggaggactccttcaccaacagcgggacaatagaggtgacgagcgcaaagaagaagaacaaggccgtagtgctggacgggacaaacgcttctaacaagatcaacttcaccaacaccggtaacatatacgtcaacactagcgacaacggaaacaagaacttggacggggacggcaacatcggtatctacgcccaaggtaactacaaaatcgagcacaacagcggcatcgtcaaggccggaaaggacgccatcgccttctacgtgaaaaactcaacaggagaagtgaacatcaacgcccctatcgagctggctaacagcaacaaggcaactactatcgggatctacagcgacggcgacgccaaggtaaaattcggggccagctcctcacttaagatcggggaaaaggctgtggggctctacagcgccgaccccacaaagttcaacaacacattcgaaatcgaaaccggcaagacactgaacgtggagctaggtaagaacagcacattcggccttctgaacggcaacaaaaacgttactaactccccactgctgtcaaagtacctgaacaacaacaccacggacaagatcaacatcaccaagttcgacgaaggcgcctccctgttctacgccacactgaaggccaaggccatcctggacgaggactacaaggtgacaaacgctgacgccgctagcacctctgtcctagtggccaacgacggggccaacgtggagatcgccagcgggaagaagctggaaaccaacacaaacgtgggcctggtggccaccaagggggctggcgcctctctgagcacctcagttgcggaaaacaaggggacccttatctctactcggacagacaagggcatcggcatctacacgtacacagccaacggtgagaacagcggaaccatcatcatgaaaaaccagaactccgttgggatactgggctccggaggatccaacctgaagaacacagggaagatcgagctggaagctatcagcagcgccggcgtgtacgccgaaaacagcaacatgatcaacagcgggacagcatcagagatcgtagtgaaaaagaaggcgtccgtgggcatctacgcccgcgaaacaagcatcagctctgtgccaaagaacgtgaaaaacgaggggaaaatcgagataaaagccgacggcgacgggaaatccgccggcatctactcgaagaaggagggcggcgccaaactgaccatcgaaaacacggggaacatcgaggtcgctcaaaaagcatcggccggcatctacgcgaaaaacgaatctaaccaggccaacacagagtctgtcgtgaccaacagcggcttaatcaagatgagcgccgagaacagcatcggcatcatgggcgaaaagagcaaggtagaaaactcaggtaccggaacaaaggggatcgagatcgccggaaaaaagagcgcaggcatcctggtgacaaaggaatctgaagtggtgaactccggcaggatccttctggccaacaactcaatcctggcgagctctgacggcctcgttggcatcagcgttgacggcagcagcacgggcgagaacgacgcctcaggagagatcaagatcgacgccgcctactctacaggaatgctctcttctggaggcgacatcaccaacgcaggaaaaatcgacctggaaaaaaaggaatctataggcatctacgccacaaacgccaacgtgacaaacaacggggctaccacgaaaggcatcttcatcaaggacgaaaagagcgttggcatctacagcaagatcaacagctctagcacggccgacaagatcgtcacaaactctggtaccatcgacataggcggaacaagcaagaccgggtccgcgggcatctactctatcgtggagaacggagctactaagagactgagcacggtatcctcggggaacatcaccatctctcagaaggagtcagtgggtatctacgccaagaacaaatcaagccaggccaacatcgagtctgttgttacaaactcagggaacggcaagatcgaggtcaagaacgagggctctgccggcatcctggtggaaaagagcaaggttaccaacacagctgtaggcaccaacggcataatcgtgagcgccaagaagtctgccggaataatcgggaagctgggcagcgaaatcatcaactcaggcataatcaagactgaaacagccacaccaacggccgccgccgacggtgtcgtcggcatcagcctgaacgcgtctaaggccaccaacgacagcaacggtacaatcacgctcgacacaaactacagcacaggcatgttcggtgagaacagctctacagcgataaacgaaggaaacatcacaggtaccaacaaggaaaacatagtcggcatggcgggtaaggccacaactgtcacaaacaagaagaccatcacgttgtccgccaaaaaatctactggcatcttcggcgaggacaacagcacgctcttgaacgacaccaacggcaacatcaccgtgaaggaagagtcctccgtcggcatctactcaaagggcaacaacaagatcgctgaaaacaagggcatcatcctcgccgaaaaaaagaagtctgccggaatgttgggttcagagggcaagctggagaacagcaacagcatcaccacccaggacgaggaaagcgccggaatgtacgtcgagaacagcagcgcaacaaacaaaaaaacaatcacagctaacggcaaaaagtcagcaggcgtgtacgtgaagctggacaaggctgccggaggcaccatcgcgggtacgaacgagggaaccaacgccaccatcacgatgacgaacgagggcagcgctgccatgctgggagaagtgaagtccctcgtgaccaacaactcggccactctgacactgaccaaccaaaacagcatcgtagtgaacaccaaggaaaccgtgggcatgatgatcactaacgacaccacaggcatccctaactccaacgtcaaggccctgaacacaggcaccatcgacctgaactccggcgctaccaacaaggacaacataggaatcctggccaacaagcgggccaccggaatcaacgagaagaacatcaacgtgaactccaaatcttctgtgggaatgctggctaaagagggttccaacatcgagaacaacaccaccttcagcaccatcaacctgaaggcagaatccggcatcggaatgctggccgacggcaaagacgcctctggcaacatatccacagccctgaacaacgctcggatagttgccacttccatcggcaagagatctctgggcatgctggcgcagaacaacggaaaagtcggcaacaacaaaaacatagacatcctggccgaaaacggagtgggcatcttcgtgagcgaaaccggcgtgggagagaacaccagcactggtactatcagcctggaaaacaaggagagcgtgggtatcttcgccaagaacaacggcaccaacgacaccgctaagaacagcggcactataaacctgggaaaggctgacggaagcacctctcacgagagcctgatcggcatgttcgcccaggccgagtccggtaagacagccagcgtgaagaacaccaaagacatcaacataaacaccaaaaagagcgttggcatgtacgccaaaaacgacgcctctaacatcaccgacgtggacctggaaaacaccggtgacataaacataaactcccaagagagcgcagggatctacgcccccaagtctaacatctcaaaggtgggaaccatcaccctgaaaaactccacagtgtctaacggcagcagcgctgtgtacgtgagcaacggaggaaaggtggccgacacagcatccgcgaagatcaacctcgggaaagtgaaccagaacagagtggcttactacgtgaacggtaaggactcagcgctcgccggcgccaacatcggcaagatcacagggtacggcgtgggagtatacctgcagggcgcgtctggagacaaggccaccctggactcgaacaccagcaaactggactacaccgcccagggcacaggcaacggcatcatcggcctactgctgaagggtgaaacagacatccagagctacatcaaaggcatcaaggttggtaacacggttcctagaagcaaccccagcgacaaagacaaatacgcaataggcatatacgccgacgcccaggggaccgccggcactccctacaacatcaccacccctatcacggccggaaagtccggtgtgggcatcttcgctgacaaggacagcaacatcaactacacaggcaacatggaaatcggtgacggcaccacagccggcactggcatcttcatcacaaagaagatcggggcaacaggcgggagagtgaccctgggcagcaacactatcaagctgaagggaacgaagggtgtagtggctatcgcctctgagggtacggaattcaacggtggcaccgccacaatcgagctggagggcaaggacgtgcagggtgtgggcgtgtacggcaagaagggctccgacgtagacgtgtcccactggaacttcaacaaccacggaaactcggctgaagaagtgagaagcgaagagggcaaagtgcacatcaacggcaacaaaaacctgaaaccccggatggtgcttacacacgtgatcaacggcgaaacatcaatcgtgacggggaaaaccgtgaccagcgtaaacgacggcaccatcaccgcaaaggaaaacatcggcctgatggcggagggtatcaaaaaccacggcatgaccatctggcaggagggaaacttcgaggccgtgaaccacgggactatcgacttcagcgcagctgaaaagagcaccgctatgttcatcaactcggctcggggcaagaacgacggaacgatcaaagtgggaaagaactcaatcgggatctacggtttctacaacaaggacacccggaagtacgagggtgctcctgcctcccctgaccctaacaagttagagatcgaaaccaccagcaactctaaaatctccctgggcgacgcctctacgggaatgtacctcatcaacgccgagaaaatcgagaacaagggcggtcaaatcacctctgagtccggggctactaagaacgtgggcatctacgccgttaacggccaagacagcataaacgtgaacaacaagaacctaacaatgacgacggccgcaaacatcgccctcggcaacggatccgttgggctgtactccaagggccagtcctacacagtccggaactccgtgacaaacactggtaacatcacggttggcgacaagatgaccggctctccttcagtcgccatgtacgctgaaaacactaacctgacaaccgacagcaagatcacggttggtaaagacggcatcgccttctacggcaagaacagcgacatcacagccaagggatctgccaacttcagcaacaagggggtcctggcctacctggaaaactcaaagttcatctcccacctgggtaacctgggggccacccagaacaccatgctgtacctgaaaaactcaatagcgcagctggacggtgccggcaccaaggtggacatggacgtggccgacggctacactggcgcctacatcgagggcaacagcacattgacaggcgtgaaaacgatcaagctgggccaggactcaaccggcctcttcctgaaagacgccaacttcgtgagcaacgccgagagcatcaccgggaccaaggacaaggccagaggaatcctagcgaccaacagcaacctcactaacaacagcaaaatcttcctgagcggggccgagtctatcggcatctactcaaacgctaacaacaccaagtcggtagtcaacaacggagaactcaccatcgcaggcaagaagactctgggagtgttcctgaagggttcccagagcctggaaaacaaggcgaacatcaacatcgccgactctgccaacagcctggaacccacaatcggcatctacacggccgaaggaagcagcaacatacggcacacctctggcaccatcgacgtgggacagaaatctatcggcatatactcgacaactaactcgaacgtggagatgaacggaggtaagatccacgtgaaggaccagggcatcggaatctacaagcagaacggaaaggccactatcaagggagagttggacatcgacacgcacatcgcaaccaccaaggacagcgagcccaccggcgtgtacgcggtgaacgggacagaaatcaacgaccaggcctccaagatcagcatcggagcaaagtcatacggcttcatcctgaacaacaccgacgtgaacaacactaacatctacaacaacaccgacgctgggaccgtgaccatgggcaacgacagcgtgttcctgtactccaacggtaaggccatcatcaacaacaaaagggacatctctgcgaacaactcgaaccacctgatcgctttctacatcaaaaacggcggcgacttcacaaacaacggcactatcgacttcagcaccggtaaaggcaacatcggcatctacgcccccggcggtaaggctacaaacaagggccggatcctggtgggcgccactgacgacatcgaccctatgacaggaaaggtgtacacagacgtcagcaaaaccgtgtacggaatcggcatggccgccgacaacggcggccacatcgtgaacgaaggcgaaatcaggatctacaacaacaaaagcatcgggatgtacgggaagggggtgggcacaacagtggagaacaaagggacgatcagcctggacggcagcagagccaccgccacgaacaagatccagagcatgacaggagtttacgtggacgacggcgctacattcaaaaactacggaacaatcaccacaaccgactcttacgccggacgagacggcaaggtcaacgagaacgtgaccggtctggctggcgtggccgtgatgaacgggtctaccctggaaaaccacggcaaaatctacatagacgctgacaacagctacggcgtgctcatcagaggcaaacgggacaccaaggggaacgtggaaagatacgcagtgatcaaaaactacggggagatcaaagttcggggcaaaggcacttggggcatctcttggaaggacgtgtcccaggctgacatcgacgagctgcaaaagcagatcaactctaagatcagctctgaccctgagagacaggccctccgggaggcagagggcacggacaagaactaccagggcgtgaccatcacagtgaaggacggaaagcctaccttcctgagaaacggcgtgcctatcagcgactctgaggtagaacagatcggcaaacttatcggcaaagagtctaacctgggaatgagcgacatcgggttctacgtggacaccctgggacgaacaaagcccatcgacatcgacggcgcaaaccctccaatcaactctcagctgataatagggacagagtacagcgagaaaaccaacaaaaagcaatggttcgtgaagggagacgtgataaagcccttcctggaccagatccagggtagaaacttcaaactgacatccatcgccggcagcctgacctggatcgctacccctgtgctggacaactacggccagataaccggggtggccatggctaagctgccctacacatctttcgtgaagaagacagacaacgcctggaacttcaccgacggccttgaacagagatacgacatgaacgccctggacagcgtagagaaaagaatcttcaacaagctgaacggaatagggaaaaacgaagaggccctgctgactcaggcttacgacgagatgatgggtcaccagtacgccaacgttcagcagagaggcggaggctctggaggagggtccggagggggctcaggctacatccccgaggcccctagagatggccaggcctacgtgcggaaggacggagaatgggtgctgctgagcaccttcctgtgatga

SEQ ID NO: 16 - DNA, 11079 bp, Fusobacterium nucleatum
  source 1..11079: mol_type = other DNA
atggaaacagacacattgctgctatgggtcctgctgctctgggttccaggctccactggtgacgaagtgaacactgagcaaatgaaggtggtgccaacacgcgaagagatcgtctcgagcaaagagaacctgaagaactccgtcggaggactgcagaccaaaatcaacgacgccagatccgaaaacgaaaaggcgctgaaggggctgagactggagctaatacagctgatggaacagggaaaccaagtggtcaagtccccttggtcctcttggcagttcggcatgaactacttctacgaccactggggaagcgaatacaaggggcggggggacaagccccagaagtacctgttcaacggaatctacaccagaggtaactggaaagtgcggaacgccatggacgtagccgagaaccagagagttggtggaagacccctgacgcctggcaacgactctctgaacagctggaagaacgctaacaacagcagcaactccggcgtgaagatcgacagagacaacagcatctcttctagcacaaacgggaaccggagctggggcctggtggacctggaaaacctccgagaacctaccaacgaagtcgagatcctggcgagaatcagccccaaagaggtgaccaagcaggcaataagcctaaacatcacagaacctaccgtgcagaccctggaggcccctgacgtgaacccccaggtgaacgagcctctgcctgcccctgtgatagacctgcccgaagtagaaacggtgaccatcaaccctctgactatcaacgctcctgacgctcctaccgcgccttctgcgcctacaatcaacatcggcataacagcccccagcgcgcctagcgcccctaccatcaacgtggtgcccaccagcccctccacacctagcgcccctacgatcaacatcggcatccaacctcctagcatcacccctctgagcatcaccacgcctgacagcgttgacgccccaaacgtcgtatctccgcagatcaagccggtcgacttcacagtggaccctggcggggacagcaacgcttactctagcgagaagcacaacagccaccagggctggaaggccagctggtccaagaccatcaacgtgacagagctgaccaaccggaactacgtgtccctgacaagagacaccgctgactcgaccatcccaacagaccaggtgataaacgtgaccaaagagaacaacagagccatggtggttgacgaggtgagaaagaacgggatcgtagtggacttcaagggcaccatcaacctgcagagaagccagaacgtgggcatcgacctgcaaggtacacaccagggcagcaagagcgacccactgatcgccaacatctacaactccggaaagatcatcggcaacgccaaatacggaagcacggccaacaaggagcagatcgccttcggattcaacaacgccgacggctccaacaacacgaccatgaccaacatggtgaacaaaggagagataacactgaacgcgccttcctccgccggtatccaactgaagcctgaagacccccacgactggcagcctaactcttggaacgccgcgccactgcaaatcgacaacaagacgcccaacaaaatcaagggcagagtgctgatgaaggctgacaaccagaaagacataaacctgaacggctcaggcagcttcggcatggtcaccgtgttcaacgagggcgtacccaagagactgttcgcacccagctacgtaacaaactacgagaacttgcggtccgagcggacatacgacggcgagagagtgctgccaggcggcgagatcggccggagcgctctgtctgactctaaatacacatccggcgtgtacaacaccggcaacatcaacatcaacggtgacagctctatcggcgtgggcctgctgcaggagatacaggaggtgaagctcgccgggaacatcaacataggcaccaaggctgttacacaggagactggcatcagcaacctgcccaacgccgggtcgaaaacctacagcatcaacaaggtcgaagaggccgtgggagtgttcgccggcgtccctacgatgcctgtgaagcctggcgagacagacaccctgatcaacggctctggcgcaagaaacacagccacttccttggtgggcaccgagacagtggagatcaacggaaacatcagcctcggcgagcacgcgacccagtcaatcggcgccctggtgggcgacacggaagtggacctcaacaagggtcagctgaccgagaacggcgtaaacaaaggctctaacgccgacagaaagctgaagagaagcggggacatcacagcaaagagcaacagcatcatcaacgtgggcggaaaaaagaactacggattcgtggtgtctaactcagcccacagcagcaagttcggcacaaccgtggacagcctcgagtacaaggtggacaaaacccaccacggaaaaggcatcaacgaaggcaaaatcaacgtaacgggcgacgagtccgttggtttcgccatgatcaagggaggcgacagcaagagcagcggcatcatctctgtaggcaacaacgcggagaactccatcggcttctacggcaaggaggactccttcaccaacagcgggacaatagaggtgacgagcgcaaagaagaagaacaaggccgtagtgctggacgggacaaacgcttctaacaagatcaacttcaccaacaccggtaacatatacgtcaacactagcgacaacggaaacaagaacttggacggggacggcaacatcggtatctacgcccaaggtaactacaaaatcgagcacaacagcggcatcgtcaaggccggaaaggacgccatcgccttctacgtgaaaaactcaacaggagaagtgaacatcaacgcccctatcgagctggctaacagcaacaaggcaactactatcgggatctacagcgacggcgacgccaaggtaaaattcggggccagctcctcacttaagatcggggaaaaggctgtggggctctacagcgccgaccccacaaagttcaacaacacattcgaaatcgaaaccggcaagacactgaacgtggagctaggtaagaacagcacattcggccttctgaacggcaacaaaaacgttactaactccccactgctgtcaaagtacctgaacaacaacaccacggacaagatcaacatcaccaagttcgacgaaggcgcctccctgttctacgccacactgaaggccaaggccatcctggacgaggactacaaggtgacaaacgctgacgccgctagcacctctgtcctagtggccaacgacggggccaacgtggagatcgccagcgggaagaagctggaaaccaacacaaacgtgggcctggtggccaccaagggggctggcgcctctctgagcacctcagttgcggaaaacaaggggacccttatctctactcggacagacaagggcatcggcatctacacgtacacagccaacggtgagaacagcggaaccatcatcatgaaaaaccagaactccgttgggatactgggctccggaggatccaacctgaagaacacagggaagatcgagctggaagctatcagcagcgccggcgtgtacgccgaaaacagcaacatgatcaacagcgggacagcatcagagatcgtagtgaaaaagaaggcgtccgtgggcatctacgcccgcgaaacaagcatcagctctgtgccaaagaacgtgaaaaacgaggggaaaatcgagataaaagccgacggcgacgggaaatccgccggcatctactcgaagaaggagggcggcgccaaactgaccatcgaaaacacggggaacatcgaggtcgctcaaaaagcatcggccggcatctacgcgaaaaacgaatctaaccaggccaacacagagtctgtcgtgaccaacagcggcttaatcaagatgagcgccgagaacagcatcggcatcatgggcgaaaagagcaaggtagaaaactcaggtaccggaacaaaggggatcgagatcgccggaaaaaagagcgcaggcatcctggtgacaaaggaatctgaagtggtgaactccggcaggatccttctggccaacaactcaatcctggcgagctctgacggcctcgttggcatcagcgttgacggcagcagcacgggcgagaacgacgcctcaggagagatcaagatcgacgccgcctactctacaggaatgctctcttctggaggcgacatcaccaacgcaggaaaaatcgacctggaaaaaaaggaatctataggcatctacgccacaaacgccaacgtgacaaacaacggggctaccacgaaaggcatcttcatcaaggacgaaaagagcgttggcatctacagcaagatcaacagctctagcacggccgacaagatcgtcacaaactctggtaccatcgacataggcggaacaagcaagaccgggtccgcgggcatctactctatcgtggagaacggagctactaagagactgagcacggtatcctcggggaacatcaccatctctcagaaggagtcagtgggtatctacgccaagaacaaatcaagccaggccaacatcgagtctgttgttacaaactcagggaacggcaagatcgaggtcaagaacgagggctctgccggcatcctggtggaaaagagcaaggttaccaacacagctgtaggcaccaacggcataatcgtgagcgccaagaagtctgccggaataatcgggaagctgggcagcgaaatcatcaactcaggcataatcaagactgaaacagccacaccaacggccgccgccgacggtgtcgtcggcatcagcctgaacgcgtctaaggccaccaacgacagcaacggtacaatcacgctcgacacaaactacagcacaggcatgttcggtgagaacagctctacagcgataaacgaaggaaacatcacaggtaccaacaaggaaaacatagtcggcatggcgggtaaggccacaactgtcacaaacaagaagaccatcacgttgtccgccaaaaaatctactggcatcttcggcgaggacaacagcacgctcttgaacgacaccaacggcaacatcaccgtgaaggaagagtcctccgtcggcatctactcaaagggcaacaacaagatcgctgaaaacaagggcatcatcctcgccgaaaaaaagaagtctgccggaatgttgggttcagagggcaagctggagaacagcaacagcatcaccacccaggacgaggaaagcgccggaatgtacgtcgagaacagcagcgcaacaaacaaaaaaacaatcacagctaacggcaaaaagtcagcaggcgtgtacgtgaagctggacaaggctgccggaggcaccatcgcgggtacgaacgagggaaccaacgccaccatcacgatgacgaacgagggcagcgctgccatgctgggagaagtgaagtccctcgtgaccaacaactcggccactctgacactgaccaaccaaaacagcatcgtagtgaacaccaaggaaaccgtgggcatgatgatcactaacgacaccacaggcatccctaactccaacgtcaaggccctgaacacaggcaccatcgacctgaactccggcgctaccaacaaggacaacataggaatcctggccaacaagcgggccaccggaatcaacgagaagaacatcaacgtgaactccaaatcttctgtgggaatgctggctaaagagggttccaacatcgagaacaacaccaccttcagcaccatcaacctgaaggcagaatccggcatcggaatgctggccgacggcaaagacgcctctggcaacatatccacagccctgaacaacgctcggatagttgccacttccatcggcaagagatctctgggcatgctggcgcagaacaacggaaaagtcggcaacaacaaaaacatagacatcctggccgaaaacggagtgggcatcttcgtgagcgaaaccggcgtgggagagaacaccagcactggtactatcagcctggaaaacaaggagagcgtgggtatcttcgccaagaacaacggcaccaacgacaccgctaagaacagcggcactataaacctgggaaaggctgacggaagcacctctcacgagagcctgatcggcatgttcgcccaggccgagtccggtaagacagccagcgtgaagaacaccaaagacatcaacataaacaccaaaaagagcgttggcatgtacgccaaaaacgacgcctctaacatcaccgacgtggacctggaaaacaccggtgacataaacataaactcccaagagagcgcagggatctacgcccccaagtctaacatctcaaaggtgggaaccatcaccctgaaaaactccacagtgtctaacggcagcagcgctgtgtacgtgagcaacggaggaaaggtggccgacacagcatccgcgaagatcaacctcgggaaagtgaaccagaacagagtggcttactacgtgaacggtaaggactcagcgctcgccggcgccaacatcggcaagatcacagggtacggcgtgggagtatacctgcagggcgcgtctggagacaaggccaccctggactcgaacaccagcaaactggactacaccgcccagggcacaggcaacggcatcatcggcctactgctgaagggtgaaacagacatccagagctacatcaaaggcatcaaggttggtaacacggttcctagaagcaaccccagcgacaaagacaaatacgcaataggcatatacgccgacgcccaggggaccgccggcactccctacaacatcaccacccctatcacggccggaaagtccggtgtgggcatcttcgctgacaaggacagcaacatcaactacacaggcaacatggaaatcggtgacggcaccacagccggcactggcatcttcatcacaaagaagatcggggcaacaggcgggagagtgaccctgggcagcaacactatcaagctgaagggaacgaagggtgtagtggctatcgcctctgagggtacggaattcaacggtggcaccgccacaatcgagctggagggcaaggacgtgcagggtgtgggcgtgtacggcaagaagggctccgacgtagacgtgtcccactggaacttcaacaaccacggaaactcggctgaagaagtgagaagcgaagagggcaaagtgcacatcaacggcaacaaaaacctgaaaccccggatggtgcttacacacgtgatcaacggcgaaacatcaatcgtgacggggaaaaccgtgaccagcgtaaacgacggcaccatcaccgcaaaggaaaacatcggcctgatggcggagggtatcaaaaaccacggcatgaccatctggcaggagggaaacttcgaggccgtgaaccacgggactatcgacttcagcgcagctgaaaagagcaccgctatgttcatcaactcggctcggggcaagaacgacggaacgatcaaagtgggaaagaactcaatcgggatctacggtttctacaacaaggacacccggaagtacgagggtgctcctgcctcccctgaccctaacaagttagagatcgaaaccaccagcaactctaaaatctccctgggcgacgcctctacgggaatgtacctcatcaacgccgagaaaatcgagaacaagggcggtcaaatcacctctgagtccggggctactaagaacgtgggcatctacgccgttaacggccaagacagcataaacgtgaacaacaagaacctaacaatgacgacggccgcaaacatcgccctcggcaacggatccgttgggctgtactccaagggccagtcctacacagtccggaactccgtgacaaacactggtaacatcacggttggcgacaagatgaccggctctccttcagtcgccatgtacgctgaaaacactaacctgacaaccgacagcaagatcacggttggtaaagacggcatcgccttctacggcaagaacagcgacatcacagccaagggatctgccaacttcagcaacaagggggtcctggcctacctggaaaactcaaagttcatctcccacctgggtaacctgggggccacccagaacaccatgctgtacctgaaaaactcaatagcgcagctggacggtgccggcaccaaggtggacatggacgtggccgacggctacactggcgcctacatcgagggcaacagcacattgacaggcgtgaaaacgatcaagctgggccaggactcaaccggcctcttcctgaaagacgccaacttcgtgagcaacgccgagagcatcaccgggaccaaggacaaggccagaggaatcctagcgaccaacagcaacctcactaacaacagcaaaatcttcctgagcggggccgagtctatcggcatctactcaaacgctaacaacaccaagtcggtagtcaacaacggagaactcaccatcgcaggcaagaagactctgggagtgttcctgaagggttcccagagcctggaaaacaaggcgaacatcaacatcgccgactctgccaacagcctggaacccacaatcggcatctacacggccgaaggaagcagcaacatacggcacacctctggcaccatcgacgtgggacagaaatctatcggcatatactcgacaactaactcgaacgtggagatgaacggaggtaagatccacgtgaaggaccagggcatcggaatctacaagcagaacggaaaggccactatcaagggagagttggacatcgacacgcacatcgcaaccaccaaggacagcgagcccaccggcgtgtacgcggtgaacgggacagaaatcaacgaccaggcctccaagatcagcatcggagcaaagtcatacggcttcatcctgaacaacaccgacgtgaacaacactaacatctacaacaacaccgacgctgggaccgtgaccatgggcaacgacagcgtgttcctgtactccaacggtaaggccatcatcaacaacaaaagggacatctctgcgaacaactcgaaccacctgatcgctttctacatcaaaaacggcggcgacttcacaaacaacggcactatcgacttcagcaccggtaaaggcaacatcggcatctacgcccccggcggtaaggctacaaacaagggccggatcctggtgggcgccactgacgacatcgaccctatgacaggaaaggtgtacacagacgtcagcaaaaccgtgtacggaatcggcatggccgccgacaacggcggccacatcgtgaacgaaggcgaaatcaggatctacaacaacaaaagcatcgggatgtacgggaagggggtgggcacaacagtggagaacaaagggacgatcagcctggacggcagcagagccaccgccacgaacaagatccagagcatgacaggagtttacgtggacgacggcgctacattcaaaaactacggaacaatcaccacaaccgactcttacgccggacgagacggcaaggtcaacgagaacgtgaccggtctggctggcgtggccgtgatgaacgggtctaccctggaaaaccacggcaaaatctacatagacgctgacaacagctacggcgtgctcatcagaggcaaacgggacaccaaggggaacgtggaaagatacgcagtgatcaaaaactacggggagatcaaagttcggggcaaaggcacttggggcatctcttggaaggacgtgtcccaggctgacatcgacgagctgcaaaagcagatcaactctaagatcagctctgaccctgagagacaggccctccgggaggcagagggcacggacaagaactaccagggcgtgaccatcacagtgaaggacggaaagcctaccttcctgagaaacggcgtgcctatcagcgactctgaggtagaacagatcggcaaacttatcggcaaagagtctaacctgggaatgagcgacatcgggttctacgtggacaccctgggacgaacaaagcccatcgacatcgacggcgcaaaccctccaatcaactctcagctgataatagggacagagtacagcgagaaaaccaacaaaaagcaatggttcgtgaagggagacgtgataaagcccttcctggaccagatccagggtagaaacttcaaactgacatccatcgccggcagcctgacctggatcgctacccctgtgctggacaactacggccagataaccggggtggccatggctaagctgccctacacatctttcgtgaagaagacagacaacgcctggaacttcaccgacggccttgaacagagatacgacatgaacgccctggacagcgtagagaaaagaatcttcaacaagctgaacggaatagggaaaaacgaagaggccctgctgactcaggcttacgacgagatgatgggtcaccagtacgccaacgttcagcagagaggcggaggctctggaggagggtccggagggggctcaatgaagatggaggagctgttcaagaagcacaagatcgtggccgtgctgagagccaacagcgtggaagaagccaagaaaaaggctctggccgtgttcctgggaggcgtgcacctgatcgagatcacattcaccgtgcccgacgccgacaccgtgatcaaggagctctctttcctgaaagagatgggcgccatcatcggcgccggcaccgtgacaagcgtggagcaggccagaaaggccgtcgagagcggcgctgaattcatcgtgtcccctcacctggacgaggaaatcagccagttcgccaaggagaagggcgtgttctacatgcctggcgtgatgacccctacagagctggtcaaggccatgaaactgggccacaccatcctgaagctgttccccggcgaggtggtgggcccccagttcgtgaaggctatgaaaggacctttccctaacgtgaagttcgtgccaaccggcggcgtgaacctggacaacgtttgcgaatggttcaaggccggagttctggccgtgggcgtcggatctgccctggtgaagggcacacctgtggaagtggccgagaaagctaaggccttcgtggaaaagatccggggctgcaccgagtgatga

SEQ ID NO: 17 - DNA, 10626 bp, Fusobacterium nucleatum
  source 1..10626: mol_type = other DNA
atggaaacagacacattgctgctatgggtcctgctgctctgggttccaggctccactggtgacgaagtgaacactgagcaaatgaaggtggtgccaacacgcgaagagatcgtctcgagcaaagagaacctgaagaactccgtcggaggactgcagaccaaaatcaacgacgccagatccgaaaacgaaaaggcgctgaaggggctgagactggagctaatacagctgatggaacagggaaaccaagtggtcaagtccccttggtcctcttggcagttcggcatgaactacttctacgaccactggggaagcgaatacaaggggcggggggacaagccccagaagtacctgttcaacggaatctacaccagaggtaactggaaagtgcggaacgccatggacgtagccgagaaccagagagttggtggaagacccctgacgcctggcaacgactctctgaacagctggaagaacgctaacaacagcagcaactccggcgtgaagatcgacagagacaacagcatctcttctagcacaaacgggaaccggagctggggcctggtggacctggaaaacctccgagaacctaccaacgaagtcgagatcctggcgagaatcagccccaaagaggtgaccaagcaggcaataagcctaaacatcacagaacctaccgtgcagaccctggaggcccctgacgtgaacccccaggtgaacgagcctctgcctgcccctgtgatagacctgcccgaagtagaaacggtgaccatcaaccctctgactatcaacgctcctgacgctcctaccgcgccttctgcgcctacaatcaacatcggcataacagcccccagcgcgcctagcgcccctaccatcaacgtggtgcccaccagcccctccacacctagcgcccctacgatcaacatcggcatccaacctcctagcatcacccctctgagcatcaccacgcctgacagcgttgacgccccaaacgtcgtatctccgcagatcaagccggtcgacttcacagtggaccctggcggggacagcaacgcttactctagcgagaagcacaacagccaccagggctggaaggccagctggtccaagaccatcaacgtgacagagctgaccaaccggaactacgtgtccctgacaagagacaccgctgactcgaccatcccaacagaccaggtgataaacgtgaccaaagagaacaacagagccatggtggttgacgaggtgagaaagaacgggatcgtagtggacttcaagggcaccatcaacctgcagagaagccagaacgtgggcatcgacctgcaaggtacacaccagggcagcaagagcgacccactgatcgccaacatctacaactccggaaagatcatcggcaacgccaaatacggaagcacggccaacaaggagcagatcgccttcggattcaacaacgccgacggctccaacaacacgaccatgaccaacatggtgaacaaaggagagataacactgaacgcgccttcctccgccggtatccaactgaagcctgaagacccccacgactggcagcctaactcttggaacgccgcgccactgcaaatcgacaacaagacgcccaacaaaatcaagggcagagtgctgatgaaggctgacaaccagaaagacataaacctgaacggctcaggcagcttcggcatggtcaccgtgttcaacgagggcgtacccaagagactgttcgcacccagctacgtaacaaactacgagaacttgcggtccgagcggacatacgacggcgagagagtgctgccaggcggcgagatcggccggagcgctctgtctgactctaaatacacatccggcgtgtacaacaccggcaacatcaacatcaacggtgacagctctatcggcgtgggcctgctgcaggagatacaggaggtgaagctcgccgggaacatcaacataggcaccaaggctgttacacaggagactggcatcagcaacctgcccaacgccgggtcgaaaacctacagcatcaacaaggtcgaagaggccgtgggagtgttcgccggcgtccctacgatgcctgtgaagcctggcgagacagacaccctgatcaacggctctggcgcaagaaacacagccacttccttggtgggcaccgagacagtggagatcaacggaaacatcagcctcggcgagcacgcgacccagtcaatcggcgccctggtgggcgacacggaagtggacctcaacaagggtcagctgaccgagaacggcgtaaacaaaggctctaacgccgacagaaagctgaagagaagcggggacatcacagcaaagagcaacagcatcatcaacgtgggcggaaaaaagaactacggattcgtggtgtctaactcagcccacagcagcaagttcggcacaaccgtggacagcctcgagtacaaggtggacaaaacccaccacggaaaaggcatcaacgaaggcaaaatcaacgtaacgggcgacgagtccgttggtttcgccatgatcaagggaggcgacagcaagagcagcggcatcatctctgtaggcaacaacgcggagaactccatcggcttctacggcaaggaggactccttcaccaacagcgggacaatagaggtgacgagcgcaaagaagaagaacaaggccgtagtgctggacgggacaaacgcttctaacaagatcaacttcaccaacaccggtaacatatacgtcaacactagcgacaacggaaacaagaacttggacggggacggcaacatcggtatctacgcccaaggtaactacaaaatcgagcacaacagcggcatcgtcaaggccggaaaggacgccatcgccttctacgtgaaaaactcaacaggagaagtgaacatcaacgcccctatcgagctggctaacagcaacaaggcaactactatcgggatctacagcgacggcgacgccaaggtaaaattcggggccagctcctcacttaagatcggggaaaaggctgtggggctctacagcgccgaccccacaaagttcaacaacacattcgaaatcgaaaccggcaagacactgaacgtggagctaggtaagaacagcacattcggccttctgaacggcaacaaaaacgttactaactccccactgctgtcaaagtacctgaacaacaacaccacggacaagatcaacatcaccaagttcgacgaaggcgcctccctgttctacgccacactgaaggccaaggccatcctggacgaggactacaaggtgacaaacgctgacgccgctagcacctctgtcctagtggccaacgacggggccaacgtggagatcgccagcgggaagaagctggaaaccaacacaaacgtgggcctggtggccaccaagggggctggcgcctctctgagcacctcagttgcggaaaacaaggggacccttatctctactcggacagacaagggcatcggcatctacacgtacacagccaacggtgagaacagcggaaccatcatcatgaaaaaccagaactccgttgggatactgggctccggaggatccaacctgaagaacacagggaagatcgagctggaagctatcagcagcgccggcgtgtacgccgaaaacagcaacatgatcaacagcgggacagcatcagagatcgtagtgaaaaagaaggcgtccgtgggcatctacgcccgcgaaacaagcatcagctctgtgccaaagaacgtgaaaaacgaggggaaaatcgagataaaagccgacggcgacgggaaatccgccggcatctactcgaagaaggagggcggcgccaaactgaccatcgaaaacacggggaacatcgaggtcgctcaaaaagcatcggccggcatctacgcgaaaaacgaatctaaccaggccaacacagagtctgtcgtgaccaacagcggcttaatcaagatgagcgccgagaacagcatcggcatcatgggcgaaaagagcaaggtagaaaactcaggtaccggaacaaaggggatcgagatcgccggaaaaaagagcgcaggcatcctggtgacaaaggaatctgaagtggtgaactccggcaggatccttctggccaacaactcaatcctggcgagctctgacggcctcgttggcatcagcgttgacggcagcagcacgggcgagaacgacgcctcaggagagatcaagatcgacgccgcctactctacaggaatgctctcttctggaggcgacatcaccaacgcaggaaaaatcgacctggaaaaaaaggaatctataggcatctacgccacaaacgccaacgtgacaaacaacggggctaccacgaaaggcatcttcatcaaggacgaaaagagcgttggcatctacagcaagatcaacagctctagcacggccgacaagatcgtcacaaactctggtaccatcgacataggcggaacaagcaagaccgggtccgcgggcatctactctatcgtggagaacggagctactaagagactgagcacggtatcctcggggaacatcaccatctctcagaaggagtcagtgggtatctacgccaagaacaaatcaagccaggccaacatcgagtctgttgttacaaactcagggaacggcaagatcgaggtcaagaacgagggctctgccggcatcctggtggaaaagagcaaggttaccaacacagctgtaggcaccaacggcataatcgtgagcgccaagaagtctgccggaataatcgggaagctgggcagcgaaatcatcaactcaggcataatcaagactgaaacagccacaccaacggccgccgccgacggtgtcgtcggcatcagcctgaacgcgtctaaggccaccaacgacagcaacggtacaatcacgctcgacacaaactacagcacaggcatgttcggtgagaacagctctacagcgataaacgaaggaaacatcacaggtaccaacaaggaaaacatagtcggcatggcgggtaaggccacaactgtcacaaacaagaagaccatcacgttgtccgccaaaaaatctactggcatcttcggcgaggacaacagcacgctcttgaacgacaccaacggcaacatcaccgtgaaggaagagtcctccgtcggcatctactcaaagggcaacaacaagatcgctgaaaacaagggcatcatcctcgccgaaaaaaagaagtctgccggaatgttgggttcagagggcaagctggagaacagcaacagcatcaccacccaggacgaggaaagcgccggaatgtacgtcgagaacagcagcgcaacaaacaaaaaaacaatcacagctaacggcaaaaagtcagcaggcgtgtacgtgaagctggacaaggctgccggaggcaccatcgcgggtacgaacgagggaaccaacgccaccatcacgatgacgaacgagggcagcgctgccatgctgggagaagtgaagtccctcgtgaccaacaactcggccactctgacactgaccaaccaaaacagcatcgtagtgaacaccaaggaaaccgtgggcatgatgatcactaacgacaccacaggcatccctaactccaacgtcaaggccctgaacacaggcaccatcgacctgaactccggcgctaccaacaaggacaacataggaatcctggccaacaagcgggccaccggaatcaacgagaagaacatcaacgtgaactccaaatcttctgtgggaatgctggctaaagagggttccaacatcgagaacaacaccaccttcagcaccatcaacctgaaggcagaatccggcatcggaatgctggccgacggcaaagacgcctctggcaacatatccacagccctgaacaacgctcggatagttgccacttccatcggcaagagatctctgggcatgctggcgcagaacaacggaaaagtcggcaacaacaaaaacatagacatcctggccgaaaacggagtgggcatcttcgtgagcgaaaccggcgtgggagagaacaccagcactggtactatcagcctggaaaacaaggagagcgtgggtatcttcgccaagaacaacggcaccaacgacaccgctaagaacagcggcactataaacctgggaaaggctgacggaagcacctctcacgagagcctgatcggcatgttcgcccaggccgagtccggtaagacagccagcgtgaagaacaccaaagacatcaacataaacaccaaaaagagcgttggcatgtacgccaaaaacgacgcctctaacatcaccgacgtggacctggaaaacaccggtgacataaacataaactcccaagagagcgcagggatctacgcccccaagtctaacatctcaaaggtgggaaccatcaccctgaaaaactccacagtgtctaacggcagcagcgctgtgtacgtgagcaacggaggaaaggtggccgacacagcatccgcgaagatcaacctcgggaaagtgaaccagaacagagtggcttactacgtgaacggtaaggactcagcgctcgccggcgccaacatcggcaagatcacagggtacggcgtgggagtatacctgcagggcgcgtctggagacaaggccaccctggactcgaacaccagcaaactggactacaccgcccagggcacaggcaacggcatcatcggcctactgctgaagggtgaaacagacatccagagctacatcaaaggcatcaaggttggtaacacggttcctagaagcaaccccagcgacaaagacaaatacgcaataggcatatacgccgacgcccaggggaccgccggcactccctacaacatcaccacccctatcacggccggaaagtccggtgtgggcatcttcgctgacaaggacagcaacatcaactacacaggcaacatggaaatcggtgacggcaccacagccggcactggcatcttcatcacaaagaagatcggggcaacaggcgggagagtgaccctgggcagcaacactatcaagctgaagggaacgaagggtgtagtggctatcgcctctgagggtacggaattcaacggtggcaccgccacaatcgagctggagggcaaggacgtgcagggtgtgggcgtgtacggcaagaagggctccgacgtagacgtgtcccactggaacttcaacaaccacggaaactcggctgaagaagtgagaagcgaagagggcaaagtgcacatcaacggcaacaaaaacctgaaaccccggatggtgcttacacacgtgatcaacggcgaaacatcaatcgtgacggggaaaaccgtgaccagcgtaaacgacggcaccatcaccgcaaaggaaaacatcggcctgatggcggagggtatcaaaaaccacggcatgaccatctggcaggagggaaacttcgaggccgtgaaccacgggactatcgacttcagcgcagctgaaaagagcaccgctatgttcatcaactcggctcggggcaagaacgacggaacgatcaaagtgggaaagaactcaatcgggatctacggtttctacaacaaggacacccggaagtacgagggtgctcctgcctcccctgaccctaacaagttagagatcgaaaccaccagcaactctaaaatctccctgggcgacgcctctacgggaatgtacctcatcaacgccgagaaaatcgagaacaagggcggtcaaatcacctctgagtccggggctactaagaacgtgggcatctacgccgttaacggccaagacagcataaacgtgaacaacaagaacctaacaatgacgacggccgcaaacatcgccctcggcaacggatccgttgggctgtactccaagggccagtcctacacagtccggaactccgtgacaaacactggtaacatcacggttggcgacaagatgaccggctctccttcagtcgccatgtacgctgaaaacactaacctgacaaccgacagcaagatcacggttggtaaagacggcatcgccttctacggcaagaacagcgacatcacagccaagggatctgccaacttcagcaacaagggggtcctggcctacctggaaaactcaaagttcatctcccacctgggtaacctgggggccacccagaacaccatgctgtacctgaaaaactcaatagcgcagctggacggtgccggcaccaaggtggacatggacgtggccgacggctacactggcgcctacatcgagggcaacagcacattgacaggcgtgaaaacgatcaagctgggccaggactcaaccggcctcttcctgaaagacgccaacttcgtgagcaacgccgagagcatcaccgggaccaaggacaaggccagaggaatcctagcgaccaacagcaacctcactaacaacagcaaaatcttcctgagcggggccgagtctatcggcatctactcaaacgctaacaacaccaagtcggtagtcaacaacggagaactcaccatcgcaggcaagaagactctgggagtgttcctgaagggttcccagagcctggaaaacaaggcgaacatcaacatcgccgactctgccaacagcctggaacccacaatcggcatctacacggccgaaggaagcagcaacatacggcacacctctggcaccatcgacgtgggacagaaatctatcggcatatactcgacaactaactcgaacgtggagatgaacggaggtaagatccacgtgaaggaccagggcatcggaatctacaagcagaacggaaaggccactatcaagggagagttggacatcgacacgcacatcgcaaccaccaaggacagcgagcccaccggcgtgtacgcggtgaacgggacagaaatcaacgaccaggcctccaagatcagcatcggagcaaagtcatacggcttcatcctgaacaacaccgacgtgaacaacactaacatctacaacaacaccgacgctgggaccgtgaccatgggcaacgacagcgtgttcctgtactccaacggtaaggccatcatcaacaacaaaagggacatctctgcgaacaactcgaaccacctgatcgctttctacatcaaaaacggcggcgacttcacaaacaacggcactatcgacttcagcaccggtaaaggcaacatcggcatctacgcccccggcggtaaggctacaaacaagggccggatcctggtgggcgccactgacgacatcgaccctatgacaggaaaggtgtacacagacgtcagcaaaaccgtgtacggaatcggcatggccgccgacaacggcggccacatcgtgaacgaaggcgaaatcaggatctacaacaacaaaagcatcgggatgtacgggaagggggtgggcacaacagtggagaacaaagggacgatcagcctggacggcagcagagccaccgccacgaacaagatccagagcatgacaggagtttacgtggacgacggcgctacattcaaaaactacggaacaatcaccacaaccgactcttacgccggacgagacggcaaggtcaacgagaacgtgaccggtctggctggcgtggccgtgatgaacgggtctaccctggaaaaccacggcaaaatctacatagacgctgacaacagctacggcgtgctcatcagaggcaaacgggacaccaaggggaacgtggaaagatacgcagtgatcaaaaactacggggagatcaaagttcggggcaaaggcacttggggcatctcttggaaggacgtgtcccaggctgacatcgacgagctgcaaaagcagatcaactctaagatcagctctgaccctgagagacaggccctccgggaggcagagggcacggacaagaactaccagggcgtgaccatcacagtgaaggacggaaagcctaccttcctgagaaacggcgtgcctatcagcgactctgaggtagaacagatcggcaaacttatcggcaaagagtctaacctgggaatgagcgacatcgggttctacgtggacaccctgggacgaacaaagcccatcgacatcgacggcgcaaaccctccaatcaactctcagctgataatagggacagagtacagcgagaaaaccaacaaaaagcaatggttcgtgaagggagacgtgataaagcccttcctggaccagatccagggtagaaacttcaaactgacatccatcgccggcagcctgacctggatcgctacccctgtgctggacaactacggccagataaccggggtggccatggctaagctgccctacacatctttcgtgaagaagacagacaacgcctggaacttcaccgacggccttgaacagagatacgacatgaacgccctggacagcgtagagaaaagaatcttcaacaagctgaacggaatagggaaaaacgaagaggccctgctgactcaggcttacgacgagatgatgggtcaccagtacgccaacgttcagcagagaggcggaggctctgctgtgggccaggacacgcaggaggtcatcgtggtgccacactccttgccctttaaggtggtggtcatcagcgccatcctggccctggtggtgctgaccatcatctctctgatcatcctgatcatgctgtggcagaaaaagcctagaggcggaggctctgcctggtcccacccccaattcgagaagtgatga

SEQ ID NO: 18 - DNA, 1485 bp, Fusobacterium nucleatum
  source 1..1485: mol_type = other DNA
atggaaacagacacattgctgctatgggtcctgctgctctgggttccaggctccactggtgacgaagtgaacactgagcaaatgaaggtggtgccaacacgcgaagagatcgtctcgagcaaagagaacctgaagaactccgtcggaggactgcagaccaaaatcaacgacgccagatccgaaaacgaaaaggcgctgaaggggctgagactggagctaatacagctgatggaacagggaaaccaagtggtcaagtccccttggtcctcttggcagttcggcatgaactacttctacgaccactggggaagcgaatacaaggggcggggggacaagccccagaagtacctgttcaacggaatctacaccagaggtaactggaaagtgcggaacgccatggacgtagccgagaaccagagagttggtggaagacccctgacgcctggcaacgactctctgaacagctggaagaacgctaacaacagcagcaactccggcgtgaagatcgacagagacaacagcatctcttctagcacaaacgggaaccggagctggggcctggtggacctggaaaacctccgagaacctaccaacgaagtcgagatcctggcgagaatcagccccaaagaggtgaccaagcaggcaataagcctaaacatcacagaacctaccgtgcagaccctggaggcccctgacgtgaacccccaggtgaacgagcctctgcctgcccctgtgatagacctgcccgaagtagaaacggtgaccatcaaccctctgactatcaacgctcctgacgctcctaccgcgccttctgcgcctacaatcaacatcggcataacagcccccagcgcgcctagcgcccctaccatcaacgtggtgcccaccagcccctccacacctagcgcccctacgatcaacatcggcatccaacctcctagcatcacccctctgagcatcaccacgcctgacagcgttgacgccccaaacgtcgtatctccgcagatcaagccggtcgacttcacagtggaccctggcggggacagcaacgctggcggaggctctggaggagggtccggagggggctcaatggccaacaaacctatgcagccaatcaccagcaccgcaaacaagatcgtgtggtccgaccctacaagactgagcaccaccttcagcgctagcctgctgagacaaagagtgaaagtgggcatcgccgagctgaacaacgtgtctggacagtacgtgtccgtgtacaagcggcccgcccctaagcctgagggctgcgccgacgcctgcgtgatcatgcctaacgagaaccagagcatccggaccgtgatcagcggcagcgctgaaaacctggccacactcaaggccgaatgggagacacacaagagaaacgtcgacaccctgttcgccagcggcaacgccggcctgggcttcctggaccccaccgccgctatcgtgtcttctgacaccacagcctgatga

SEQ ID NO: 19 - DNA, 1317 bp, Fusobacterium nucleatum
  source 1..1317: mol_type = other DNA
atggaaacagacacattgctgctatgggtcctgctgctctgggttccaggctccactggtgacgaagtgaacactgagcaaatgaaggtggtgccaacacgcgaagagatcgtctcgagcaaagagaacctgaagaactccgtcggaggactgcagaccaaaatcaacgacgccagatccgaaaacgaaaaggcgctgaaggggctgagactggagctaatacagctgatggaacagggaaaccaagtggtcaagtccccttggtcctcttggcagttcggcatgaactacttctacgaccactggggaagcgaatacaaggggcggggggacaagccccagaagtacctgttcaacggaatctacaccagaggtaactggaaagtgcggaacgccatggacgtagccgagaaccagagagttggtggaagacccctgacgcctggcaacgactctctgaacagctggaagaacgctaacaacagcagcaactccggcgtgaagatcgacagagacaacagcatctcttctagcacaaacgggaaccggagctggggcctggtggacctggaaaacctccgagaacctaccaacgaagtcgagatcctggcgagaatcagccccaaagaggtgaccaagcaggcaataagcctaaacatcacagaacctaccgtgcagaccctggaggcccctgacgtgaacccccaggtgaacgagcctctgcctgcccctgtgatagacctgcccgaagtagaaacggtgaccatcaaccctctgactatcaacgctcctgacgctcctaccgcgccttctgcgcctacaatcaacatcggcataacagcccccagcgcgcctagcgcccctaccatcaacgtggtgcccaccagcccctccacacctagcgcccctacgatcaacatcggcatccaacctcctagcatcacccctctgagcatcaccacgcctgacagcgttgacgccccaaacgtcgtatctccgcagatcaagccggtcgacttcacagtggaccctggcggggacagcaacgctggcggaggctctcccccagaagaccctcctgatagcaagaacaccctggtgctgttcggcgctggcttcggcgccgtgatcacagtggtggtgatcgtggtcatcatcaagtgcttctgcaagcacagatcttgcttcagacggaacgaggccagcagagagacaaacaacagcctgaccttcggacctgaggaagccctggccgagcagaccgtgttcctgggcggaggctctgcctggtcccacccccaattcgagaagtgatga

SEQ ID NO: 20 - DNA, 1854 bp, Fusobacterium nucleatum
  source 1..1854: mol_type = other DNA
atggaaacagacacattgctgctatgggtcctgctgctctgggttccaggctccactggtgacgaagtgaacactgagcaaatgaaggtggtgccaacacgcgaagagatcgtctcgagcaaagagaacctgaagaactccgtcggaggactgcagaccaaaatcaacgacgccagatccgaaaacgaaaaggcgctgaaggggctgagactggagctaatacagctgatggaacagggaaaccaagtggtcaagtccccttggtcctcttggcagttcggcatgaactacttctacgaccactggggaagcgaatacaaggggcggggggacaagccccagaagtacctgttcaacggaatctacaccagaggtaactggaaagtgcggaacgccatggacgtagccgagaaccagagagttggtggaagacccctgacgcctggcaacgactctctgaacagctggaagaacgctaacaacagcagcaactccggcgtgaagatcgacagagacaacagcatctcttctagcacaaacgggaaccggagctggggcctggtggacctggaaaacctccgagaacctaccaacgaagtcgagatcctggcgagaatcagccccaaagaggtgaccaagcaggcaataagcctaaacatcacagaacctaccgtgcagaccctggaggcccctgacgtgaacccccaggtgaacgagcctctgcctgcccctgtgatagacctgcccgaagtagaaacggtgaccatcaaccctctgactatcaacgctcctgacgctcctaccgcgccttctgcgcctacaatcaacatcggcataacagcccccagcgcgcctagcgcccctaccatcaacgtggtgcccaccagcccctccacacctagcgcccctacgatcaacatcggcatccaacctcctagcatcacccctctgagcatcaccacgcctgacagcgttgacgccccaaacgtcgtatctccgcagatcaagccggtcgacttcacagtggaccctggcggggacagcaacgctggcggaggctctggaggagggtccggagggggctcaccagccgccgccgaagaaaaggccgcccctgccgccgctaaacctgctacaaccgagggcgagttccccgagacacgggagaagatgagcggcatccgcagagccatcgccaaggccatggtgcacagcaaacacaccgcccctcacgttacactgatggacgaggccgacgtgaccaagctggtcgcccaccggaagaagttcaaggccatcgccgccgagaaaggcatcaaactgaccttcctgccttacgtggtgaaggccctggtgtccgccctcagagaataccccgtgctgaacaccagcatcgacgacgaaaccgaggaaatcatccagaagcactactacaacatcggcatcgcggctgacaccgacagaggcctgctggtgccagtgatcaagcacgccgacagaaagcccatcttcgccctggcccaggagatcaatgagctggctgaaaaagccagagacggaaagctgacacctggcgagatgaagggcgcttcttgcaccatcacaaacatcggaagcgccggcggacagtggttcacccctgtgatcaaccaccctgaggtggccatcctgggcatcggcagaatcgccgagaagcctatcgtgcgggacggcgaaatcgtggctgctcctatgctggccctgagcctgtctttcgaccacagaatgatcgacggcgccaccgcccaaaaggcacttaaccacatcaagcggctgctgagcgaccccgagctgctgctgatggaagcctgatga

SEQ ID NO: 21 - DNA, 1611 bp, Fusobacterium nucleatum
  source 1..1611: mol_type = other DNA
atggaaacagacacattgctgctatgggtcctgctgctctgggttccaggctccactggtgacgaagtgaacactgagcaaatgaaggtggtgccaacacgcgaagagatcgtctcgagcaaagagaacctgaagaactccgtcggaggactgcagaccaaaatcaacgacgccagatccgaaaacgaaaaggcgctgaaggggctgagactggagctaatacagctgatggaacagggaaaccaagtggtcaagtccccttggtcctcttggcagttcggcatgaactacttctacgaccactggggaagcgaatacaaggggcggggggacaagccccagaagtacctgttcaacggaatctacaccagaggtaactggaaagtgcggaacgccatggacgtagccgagaaccagagagttggtggaagacccctgacgcctggcaacgactctctgaacagctggaagaacgctaacaacagcagcaactccggcgtgaagatcgacagagacaacagcatctcttctagcacaaacgggaaccggagctggggcctggtggacctggaaaacctccgagaacctaccaacgaagtcgagatcctggcgagaatcagccccaaagaggtgaccaagcaggcaataagcctaaacatcacagaacctaccgtgcagaccctggaggcccctgacgtgaacccccaggtgaacgagcctctgcctgcccctgtgatagacctgcccgaagtagaaacggtgaccatcaaccctctgactatcaacgctcctgacgctcctaccgcgccttctgcgcctacaatcaacatcggcataacagcccccagcgcgcctagcgcccctaccatcaacgtggtgcccaccagcccctccacacctagcgcccctacgatcaacatcggcatccaacctcctagcatcacccctctgagcatcaccacgcctgacagcgttgacgccccaaacgtcgtatctccgcagatcaagccggtcgacttcacagtggaccctggcggggacagcaacgctggcggaggctctggaggagggtccggagggggctcagaaagccaggtgcggcagcagttcagcaaagatatcattaagctgctgaacgagcaagtgaacaaggaaatgaacagcagcaacctgtacatgtctatgagctcttggtgctacacccacagcctggacggcgccggcctgttcctgttcgaccacgccgctgaagaatacgagcacgctaaaaagctgatcatcttcctgaacgaaaacaacgtgcccgtgcagctgaccagcatctccgcccctgagcacaagttcgagggcctcacccagatcttccagaaggcctacgagcacgaacaacacatcagcgagagcatcaacaacatcgtggaccacgccatcaagtccaaggaccacgccacattcaacttcctgcagtggtacgtcgccgagcagcacgaggaagaggtgctgttcaaggacatcctggacaagatcgagctgatcggaaacgagaaccacggcctgtacctggccgaccagtacgtgaagggcatcgccaaaagcagaaagagctgatga

SEQ ID NO: 22 - DNA, 1173 bp, Fusobacterium nucleatum
  source 1..1173: mol_type = other DNA
atggaaacagacacattgctgctatgggtcctgctgctctgggttccaggctccactggtgacgaagtgaacactgagcaaatgaaggtggtgccaacacgcgaagagatcgtctcgagcaaagagaacctgaagaactccgtcggaggactgcagaccaaaatcaacgacgccagatccgaaaacgaaaaggcgctgaaggggctgagactggagctaatacagctgatggaacagggaaaccaagtggtcaagtccccttggtcctcttggcagttcggcatgaactacttctacgaccactggggaagcgaatacaaggggcggggggacaagccccagaagtacctgttcaacggaatctacaccagaggtaactggaaagtgcggaacgccatggacgtagccgagaaccagagagttggtggaagacccctgacgcctggcaacgactctctgaacagctggaagaacgctaacaacagcagcaactccggcgtgaagatcgacagagacaacagcatctcttctagcacaaacgggaaccggagctggggcctggtggacctggaaaacctccgagaacctaccaacgaagtcgagatcctggcgagaatcagccccaaagaggtgaccaagcaggcaataagcctaaacatcacagaacctaccgtgcagaccctggaggcccctgacgtgaacccccaggtgaacgagcctctgcctgcccctgtgatagacctgcccgaagtagaaacggtgaccatcaaccctctgactatcaacgctcctgacgctcctaccgcgccttctgcgcctacaatcaacatcggcataacagcccccagcgcgcctagcgcccctaccatcaacgtggtgcccaccagcccctccacacctagcgcccctacgatcaacatcggcatccaacctcctagcatcacccctctgagcatcaccacgcctgacagcgttgacgccccaaacgtcgtatctccgcagatcaagccggtcgacttcacagtggaccctggcggggacagcaacgctggcggaggctctggaggagggtccggagggggctcaggctacatccccgaggcccctagagatggccaggcctacgtgcggaaggacggagaatgggtgctgctgagcaccttcctgtgatga

SEQ ID NO: 23 - DNA, 1707 bp, Fusobacterium nucleatum
  source 1..1707: mol_type = other DNA
atggaaacagacacattgctgctatgggtcctgctgctctgggttccaggctccactggtgacgaagtgaacactgagcaaatgaaggtggtgccaacacgcgaagagatcgtctcgagcaaagagaacctgaagaactccgtcggaggactgcagaccaaaatcaacgacgccagatccgaaaacgaaaaggcgctgaaggggctgagactggagctaatacagctgatggaacagggaaaccaagtggtcaagtccccttggtcctcttggcagttcggcatgaactacttctacgaccactggggaagcgaatacaaggggcggggggacaagccccagaagtacctgttcaacggaatctacaccagaggtaactggaaagtgcggaacgccatggacgtagccgagaaccagagagttggtggaagacccctgacgcctggcaacgactctctgaacagctggaagaacgctaacaacagcagcaactccggcgtgaagatcgacagagacaacagcatctcttctagcacaaacgggaaccggagctggggcctggtggacctggaaaacctccgagaacctaccaacgaagtcgagatcctggcgagaatcagccccaaagaggtgaccaagcaggcaataagcctaaacatcacagaacctaccgtgcagaccctggaggcccctgacgtgaacccccaggtgaacgagcctctgcctgcccctgtgatagacctgcccgaagtagaaacggtgaccatcaaccctctgactatcaacgctcctgacgctcctaccgcgccttctgcgcctacaatcaacatcggcataacagcccccagcgcgcctagcgcccctaccatcaacgtggtgcccaccagcccctccacacctagcgcccctacgatcaacatcggcatccaacctcctagcatcacccctctgagcatcaccacgcctgacagcgttgacgccccaaacgtcgtatctccgcagatcaagccggtcgacttcacagtggaccctggcggggacagcaacgctggcggaggctctggaggagggtccggagggggctcaatgaagatggaggagctgttcaagaagcacaagatcgtggccgtgctgagagccaacagcgtggaagaagccaagaaaaaggctctggccgtgttcctgggaggcgtgcacctgatcgagatcacattcaccgtgcccgacgccgacaccgtgatcaaggagctctctttcctgaaagagatgggcgccatcatcggcgccggcaccgtgacaagcgtggagcaggccagaaaggccgtcgagagcggcgctgaattcatcgtgtcccctcacctggacgaggaaatcagccagttcgccaaggagaagggcgtgttctacatgcctggcgtgatgacccctacagagctggtcaaggccatgaaactgggccacaccatcctgaagctgttccccggcgaggtggtgggcccccagttcgtgaaggctatgaaaggacctttccctaacgtgaagttcgtgccaaccggcggcgtgaacctggacaacgtttgcgaatggttcaaggccggagttctggccgtgggcgtcggatctgccctggtgaagggcacacctgtggaagtggccgagaaagctaaggccttcgtggaaaagatccggggctgcaccgagtgatga

SEQ ID NO: 24 - DNA, 1254 bp, Fusobacterium nucleatum
  source 1..1254: mol_type = other DNA
atggaaacagacacattgctgctatgggtcctgctgctctgggttccaggctccactggtgacgaagtgaacactgagcaaatgaaggtggtgccaacacgcgaagagatcgtctcgagcaaagagaacctgaagaactccgtcggaggactgcagaccaaaatcaacgacgccagatccgaaaacgaaaaggcgctgaaggggctgagactggagctaatacagctgatggaacagggaaaccaagtggtcaagtccccttggtcctcttggcagttcggcatgaactacttctacgaccactggggaagcgaatacaaggggcggggggacaagccccagaagtacctgttcaacggaatctacaccagaggtaactggaaagtgcggaacgccatggacgtagccgagaaccagagagttggtggaagacccctgacgcctggcaacgactctctgaacagctggaagaacgctaacaacagcagcaactccggcgtgaagatcgacagagacaacagcatctcttctagcacaaacgggaaccggagctggggcctggtggacctggaaaacctccgagaacctaccaacgaagtcgagatcctggcgagaatcagccccaaagaggtgaccaagcaggcaataagcctaaacatcacagaacctaccgtgcagaccctggaggcccctgacgtgaacccccaggtgaacgagcctctgcctgcccctgtgatagacctgcccgaagtagaaacggtgaccatcaaccctctgactatcaacgctcctgacgctcctaccgcgccttctgcgcctacaatcaacatcggcataacagcccccagcgcgcctagcgcccctaccatcaacgtggtgcccaccagcccctccacacctagcgcccctacgatcaacatcggcatccaacctcctagcatcacccctctgagcatcaccacgcctgacagcgttgacgccccaaacgtcgtatctccgcagatcaagccggtcgacttcacagtggaccctggcggggacagcaacgctggcggaggctctgctgtgggccaggacacgcaggaggtcatcgtggtgccacactccttgccctttaaggtggtggtcatcagcgccatcctggccctggtggtgctgaccatcatctctctgatcatcctgatcatgctgtggcagaaaaagcctagaggcggaggctctgcctggtcccacccccaattcgagaagtgatga

SEQ ID NO: 25 - DNA, 3612 bp, Fusobacterium nucleatum
  source 1..3612: mol_type = other DNA
atggaaacagacacattgctgctatgggtcctgctgctctgggttccaggctccactggtgacgaagtgaacactgagcaaatgaaggtggtgccaacacgcgaagagatcgtctcgagcaaagagaacctgaagaactccgtcggaggactgcagaccaaaatcaacgacgccagatccgaaaacgaaaaggcgctgaaggggctgagactggagctaatacagctgatggaacagggaaaccaagtggtcaagtccccttggtcctcttggcagttcggcatgaactacttctacgaccactggggaagcgaatacaaggggcggggggacaagccccagaagtacctgttcaacggaatctacaccagaggtaactggaaagtgcggaacgccatggacgtagccgagaaccagagagttggtggaagacccctgacgcctggcaacgactctctgaacagctggaagaacgctaacaacagcagcaactccggcgtgaagatcgacagagacaacagcatctcttctagcacaaacgggaaccggagctggggcctggtggacctggaaaacctccgagaacctaccaacgaagtcgagatcctggcgagaatcagccccaaagaggtgaccaagcaggcaataagcctaaacatcacagaacctaccgtgcagaccctggaggcccctgacgtgaacccccaggtgaacgagcctctgcctgcccctgtgatagacctgcccgaagtagaaacggtgaccatcaaccctctgactatcaacgctcctgacgctcctaccgcgccttctgcgcctacaatcaacatcggcataacagcccccagcgcgcctagcgcccctaccatcaacgtggtgcccaccagcccctccacacctagcgcccctacgatcaacatcggcatccaacctcctagcatcacccctctgagcatcaccacgcctgacagcgttgacgccccaaacgtcgtatctccgcagatcaagccggtcgacttcacagtggaccctggcggggacagcaacgcttactctagcgagaagcacaacagccaccagggctggaaggccagctggtccaagaccatcaacgtgacagagctgaccaaccggaactacgtgtccctgacaagagacaccgctgactcgaccatcccaacagaccaggtgataaacgtgaccaaagagaacaacagagccatggtggttgacgaggtgagaaagaacgggatcgtagtggacttcaagggcaccatcaacctgcagagaagccagaacgtgggcatcgacctgcaaggtacacaccagggcagcaagagcgacccactgatcgccaacatctacaactccggaaagatcatcggcaacgccaaatacggaagcacggccaacaaggagcagatcgccttcggattcaacaacgccgacggctccaacaacacgaccatgaccaacatggtgaacaaaggagagataacactgaacgcgccttcctccgccggtatccaactgaagcctgaagacccccacgactggcagcctaactcttggaacgccgcgccactgcaaatcgacaacaagacgcccaacaaaatcaagggcagagtgctgatgaaggctgacaaccagaaagacataaacctgaacggctcaggcagcttcggcatggtcaccgtgttcaacgagggcgtacccaagagactgttcgcacccagctacgtaacaaactacgagaacttgcggtccgagcggacatacgacggcgagagagtgctgccaggcggcgagatcggccggagcgctctgtctgactctaaatacacatccggcgtgtacaacaccggcaacatcaacatcaacggtgacagctctatcggcgtgggcctgctgcaggagatacaggaggtgaagctcgccgggaacatcaacataggcaccaaggctgttacacaggagactggcatcagcaacctgcccaacgccgggtcgaaaacctacagcatcaacaaggtcgaagaggccgtgggagtgttcgccggcgtccctacgatgcctgtgaagcctggcgagacagacaccctgatcaacggctctggcgcaagaaacacagccacttccttggtgggcaccgagacagtggagatcaacggaaacatcagcctcggcgagcacgcgacccagtcaatcggcgccctggtgggcgacacggaagtggacctcaacaagggtcagctgaccgagaacggcgtaaacaaaggctctaacgccgacagaaagctgaagagaagcggggacatcacagcaaagagcaacagcatcatcaacgtgggcggaaaaaagaactacggattcgtggtgtctaactcagcccacagcagcaagttcggcacaaccgtggacagcctcgagtacaaggtggacaaaacccaccacggaaaaggcatcaacgaaggcaaaatcaacgtaacgggcgacgagtccgttggtttcgccatgatcaagggaggcgacagcaagagcagcggcatcatctctgtaggcaacaacgcggagaactccatcggcttctacggcaaggaggactccttcaccaacagcgggacaatagaggtgacgagcgcaaagaagaagaacaaggccgtagtgctggacgggacaaacgcttctaacaagatcaacttcaccaacaccggtaacatatacgtcaacactagcgacaacggaaacaagaacttggacggggacggcaacatcggtatctacgcccaaggtaactacaaaatcgagcacaacagcggcatcgtcaaggccggaaaggacgccatcgccttctacgtgaaaaactcaacaggagaagtgaacatcaacgcccctatcgagctggctaacagcaacaaggcaactactatcgggatctacagcgacggcgacgccaaggtaaaattcggggccagctcctcacttaagatcggggaaaaggctgtggggctctacagcgccgaccccacaaagttcaacaacacattcgaaatcgaaaccggcaagacactgaacgtggagctaggtaagaacagcacattcggccttctgaacggcaacaaaaacgttactaactccccactgctgtcaaagtacctgaacaacaacaccacggacggcggaggctctggaggagggtccggagggggctcaatggccaacaaacctatgcagccaatcaccagcaccgcaaacaagatcgtgtggtccgaccctacaagactgagcaccaccttcagcgctagcctgctgagacaaagagtgaaagtgggcatcgccgagctgaacaacgtgtctggacagtacgtgtccgtgtacaagcggcccgcccctaagcctgagggctgcgccgacgcctgcgtgatcatgcctaacgagaaccagagcatccggaccgtgatcagcggcagcgctgaaaacctggccacactcaaggccgaatgggagacacacaagagaaacgtcgacaccctgttcgccagcggcaacgccggcctgggcttcctggaccccaccgccgctatcgtgtcttctgacaccacagcctgatga

SEQ ID NO: 26 - DNA, 3444 bp, Fusobacterium nucleatum
  source 1..3444: mol_type = other DNA
atggaaacagacacattgctgctatgggtcctgctgctctgggttccaggctccactggtgacgaagtgaacactgagcaaatgaaggtggtgccaacacgcgaagagatcgtctcgagcaaagagaacctgaagaactccgtcggaggactgcagaccaaaatcaacgacgccagatccgaaaacgaaaaggcgctgaaggggctgagactggagctaatacagctgatggaacagggaaaccaagtggtcaagtccccttggtcctcttggcagttcggcatgaactacttctacgaccactggggaagcgaatacaaggggcggggggacaagccccagaagtacctgttcaacggaatctacaccagaggtaactggaaagtgcggaacgccatggacgtagccgagaaccagagagttggtggaagacccctgacgcctggcaacgactctctgaacagctggaagaacgctaacaacagcagcaactccggcgtgaagatcgacagagacaacagcatctcttctagcacaaacgggaaccggagctggggcctggtggacctggaaaacctccgagaacctaccaacgaagtcgagatcctggcgagaatcagccccaaagaggtgaccaagcaggcaataagcctaaacatcacagaacctaccgtgcagaccctggaggcccctgacgtgaacccccaggtgaacgagcctctgcctgcccctgtgatagacctgcccgaagtagaaacggtgaccatcaaccctctgactatcaacgctcctgacgctcctaccgcgccttctgcgcctacaatcaacatcggcataacagcccccagcgcgcctagcgcccctaccatcaacgtggtgcccaccagcccctccacacctagcgcccctacgatcaacatcggcatccaacctcctagcatcacccctctgagcatcaccacgcctgacagcgttgacgccccaaacgtcgtatctccgcagatcaagccggtcgacttcacagtggaccctggcggggacagcaacgcttactctagcgagaagcacaacagccaccagggctggaaggccagctggtccaagaccatcaacgtgacagagctgaccaaccggaactacgtgtccctgacaagagacaccgctgactcgaccatcccaacagaccaggtgataaacgtgaccaaagagaacaacagagccatggtggttgacgaggtgagaaagaacgggatcgtagtggacttcaagggcaccatcaacctgcagagaagccagaacgtgggcatcgacctgcaaggtacacaccagggcagcaagagcgacccactgatcgccaacatctacaactccggaaagatcatcggcaacgccaaatacggaagcacggccaacaaggagcagatcgccttcggattcaacaacgccgacggctccaacaacacgaccatgaccaacatggtgaacaaaggagagataacactgaacgcgccttcctccgccggtatccaactgaagcctgaagacccccacgactggcagcctaactcttggaacgccgcgccactgcaaatcgacaacaagacgcccaacaaaatcaagggcagagtgctgatgaaggctgacaaccagaaagacataaacctgaacggctcaggcagcttcggcatggtcaccgtgttcaacgagggcgtacccaagagactgttcgcacccagctacgtaacaaactacgagaacttgcggtccgagcggacatacgacggcgagagagtgctgccaggcggcgagatcggccggagcgctctgtctgactctaaatacacatccggcgtgtacaacaccggcaacatcaacatcaacggtgacagctctatcggcgtgggcctgctgcaggagatacaggaggtgaagctcgccgggaacatcaacataggcaccaaggctgttacacaggagactggcatcagcaacctgcccaacgccgggtcgaaaacctacagcatcaacaaggtcgaagaggccgtgggagtgttcgccggcgtccctacgatgcctgtgaagcctggcgagacagacaccctgatcaacggctctggcgcaagaaacacagccacttccttggtgggcaccgagacagtggagatcaacggaaacatcagcctcggcgagcacgcgacccagtcaatcggcgccctggtgggcgacacggaagtggacctcaacaagggtcagctgaccgagaacggcgtaaacaaaggctctaacgccgacagaaagctgaagagaagcggggacatcacagcaaagagcaacagcatcatcaacgtgggcggaaaaaagaactacggattcgtggtgtctaactcagcccacagcagcaagttcggcacaaccgtggacagcctcgagtacaaggtggacaaaacccaccacggaaaaggcatcaacgaaggcaaaatcaacgtaacgggcgacgagtccgttggtttcgccatgatcaagggaggcgacagcaagagcagcggcatcatctctgtaggcaacaacgcggagaactccatcggcttctacggcaaggaggactccttcaccaacagcgggacaatagaggtgacgagcgcaaagaagaagaacaaggccgtagtgctggacgggacaaacgcttctaacaagatcaacttcaccaacaccggtaacatatacgtcaacactagcgacaacggaaacaagaacttggacggggacggcaacatcggtatctacgcccaaggtaactacaaaatcgagcacaacagcggcatcgtcaaggccggaaaggacgccatcgccttctacgtgaaaaactcaacaggagaagtgaacatcaacgcccctatcgagctggctaacagcaacaaggcaactactatcgggatctacagcgacggcgacgccaaggtaaaattcggggccagctcctcacttaagatcggggaaaaggctgtggggctctacagcgccgaccccacaaagttcaacaacacattcgaaatcgaaaccggcaagacactgaacgtggagctaggtaagaacagcacattcggccttctgaacggcaacaaaaacgttactaactccccactgctgtcaaagtacctgaacaacaacaccacggacggcggaggctctcccccagaagaccctcctgatagcaagaacaccctggtgctgttcggcgctggcttcggcgccgtgatcacagtggtggtgatcgtggtcatcatcaagtgcttctgcaagcacagatcttgcttcagacggaacgaggccagcagagagacaaacaacagcctgaccttcggacctgaggaagccctggccgagcagaccgtgttcctgggcggaggctctgcctggtcccacccccaattcgagaagtgatga

SEQ ID NO: 27 - DNA, 3981 bp, Fusobacterium nucleatum
  source 1..3981: mol_type = other DNA
atggaaacagacacattgctgctatgggtcctgctgctctgggttccaggctccactggtgacgaagtgaacactgagcaaatgaaggtggtgccaacacgcgaagagatcgtctcgagcaaagagaacctgaagaactccgtcggaggactgcagaccaaaatcaacgacgccagatccgaaaacgaaaaggcgctgaaggggctgagactggagctaatacagctgatggaacagggaaaccaagtggtcaagtccccttggtcctcttggcagttcggcatgaactacttctacgaccactggggaagcgaatacaaggggcggggggacaagccccagaagtacctgttcaacggaatctacaccagaggtaactggaaagtgcggaacgccatggacgtagccgagaaccagagagttggtggaagacccctgacgcctggcaacgactctctgaacagctggaagaacgctaacaacagcagcaactccggcgtgaagatcgacagagacaacagcatctcttctagcacaaacgggaaccggagctggggcctggtggacctggaaaacctccgagaacctaccaacgaagtcgagatcctggcgagaatcagccccaaagaggtgaccaagcaggcaataagcctaaacatcacagaacctaccgtgcagaccctggaggcccctgacgtgaacccccaggtgaacgagcctctgcctgcccctgtgatagacctgcccgaagtagaaacggtgaccatcaaccctctgactatcaacgctcctgacgctcctaccgcgccttctgcgcctacaatcaacatcggcataacagcccccagcgcgcctagcgcccctaccatcaacgtggtgcccaccagcccctccacacctagcgcccctacgatcaacatcggcatccaacctcctagcatcacccctctgagcatcaccacgcctgacagcgttgacgccccaaacgtcgtatctccgcagatcaagccggtcgacttcacagtggaccctggcggggacagcaacgcttactctagcgagaagcacaacagccaccagggctggaaggccagctggtccaagaccatcaacgtgacagagctgaccaaccggaactacgtgtccctgacaagagacaccgctgactcgaccatcccaacagaccaggtgataaacgtgaccaaagagaacaacagagccatggtggttgacgaggtgagaaagaacgggatcgtagtggacttcaagggcaccatcaacctgcagagaagccagaacgtgggcatcgacctgcaaggtacacaccagggcagcaagagcgacccactgatcgccaacatctacaactccggaaagatcatcggcaacgccaaatacggaagcacggccaacaaggagcagatcgccttcggattcaacaacgccgacggctccaacaacacgaccatgaccaacatggtgaacaaaggagagataacactgaacgcgccttcctccgccggtatccaactgaagcctgaagacccccacgactggcagcctaactcttggaacgccgcgccactgcaaatcgacaacaagacgcccaacaaaatcaagggcagagtgctgatgaaggctgacaaccagaaagacataaacctgaacggctcaggcagcttcggcatggtcaccgtgttcaacgagggcgtacccaagagactgttcgcacccagctacgtaacaaactacgagaacttgcggtccgagcggacatacgacggcgagagagtgctgccaggcggcgagatcggccggagcgctctgtctgactctaaatacacatccggcgtgtacaacaccggcaacatcaacatcaacggtgacagctctatcggcgtgggcctgctgcaggagatacaggaggtgaagctcgccgggaacatcaacataggcaccaaggctgttacacaggagactggcatcagcaacctgcccaacgccgggtcgaaaacctacagcatcaacaaggtcgaagaggccgtgggagtgttcgccggcgtccctacgatgcctgtgaagcctggcgagacagacaccctgatcaacggctctggcgcaagaaacacagccacttccttggtgggcaccgagacagtggagatcaacggaaacatcagcctcggcgagcacgcgacccagtcaatcggcgccctggtgggcgacacggaagtggacctcaacaagggtcagctgaccgagaacggcgtaaacaaaggctctaacgccgacagaaagctgaagagaagcggggacatcacagcaaagagcaacagcatcatcaacgtgggcggaaaaaagaactacggattcgtggtgtctaactcagcccacagcagcaagttcggcacaaccgtggacagcctcgagtacaaggtggacaaaacccaccacggaaaaggcatcaacgaaggcaaaatcaacgtaacgggcgacgagtccgttggtttcgccatgatcaagggaggcgacagcaagagcagcggcatcatctctgtaggcaacaacgcggagaactccatcggcttctacggcaaggaggactccttcaccaacagcgggacaatagaggtgacgagcgcaaagaagaagaacaaggccgtagtgctggacgggacaaacgcttctaacaagatcaacttcaccaacaccggtaacatatacgtcaacactagcgacaacggaaacaagaacttggacggggacggcaacatcggtatctacgcccaaggtaactacaaaatcgagcacaacagcggcatcgtcaaggccggaaaggacgccatcgccttctacgtgaaaaactcaacaggagaagtgaacatcaacgcccctatcgagctggctaacagcaacaaggcaactactatcgggatctacagcgacggcgacgccaaggtaaaattcggggccagctcctcacttaagatcggggaaaaggctgtggggctctacagcgccgaccccacaaagttcaacaacacattcgaaatcgaaaccggcaagacactgaacgtggagctaggtaagaacagcacattcggccttctgaacggcaacaaaaacgttactaactccccactgctgtcaaagtacctgaacaacaacaccacggacggcggaggctctggaggagggtccggagggggctcaccagccgccgccgaagaaaaggccgcccctgccgccgctaaacctgctacaaccgagggcgagttccccgagacacgggagaagatgagcggcatccgcagagccatcgccaaggccatggtgcacagcaaacacaccgcccctcacgttacactgatggacgaggccgacgtgaccaagctggtcgcccaccggaagaagttcaaggccatcgccgccgagaaaggcatcaaactgaccttcctgccttacgtggtgaaggccctggtgtccgccctcagagaataccccgtgctgaacaccagcatcgacgacgaaaccgaggaaatcatccagaagcactactacaacatcggcatcgcggctgacaccgacagaggcctgctggtgccagtgatcaagcacgccgacagaaagcccatcttcgccctggcccaggagatcaatgagctggctgaaaaagccagagacggaaagctgacacctggcgagatgaagggcgcttcttgcaccatcacaaacatcggaagcgccggcggacagtggttcacccctgtgatcaaccaccctgaggtggccatcctgggcatcggcagaatcgccgagaagcctatcgtgcgggacggcgaaatcgtggctgctcctatgctggccctgagcctgtctttcgaccacagaatgatcgacggcgccaccgcccaaaaggcacttaaccacatcaagcggctgctgagcgaccccgagctgctgctgatggaagcctgatga

SEQ ID NO: 28 - DNA, 3738 bp, Fusobacterium nucleatum
  source 1..3738: mol_type = other DNA
atggaaacagacacattgctgctatgggtcctgctgctctgggttccaggctccactggtgacgaagtgaacactgagcaaatgaaggtggtgccaacacgcgaagagatcgtctcgagcaaagagaacctgaagaactccgtcggaggactgcagaccaaaatcaacgacgccagatccgaaaacgaaaaggcgctgaaggggctgagactggagctaatacagctgatggaacagggaaaccaagtggtcaagtccccttggtcctcttggcagttcggcatgaactacttctacgaccactggggaagcgaatacaaggggcggggggacaagccccagaagtacctgttcaacggaatctacaccagaggtaactggaaagtgcggaacgccatggacgtagccgagaaccagagagttggtggaagacccctgacgcctggcaacgactctctgaacagctggaagaacgctaacaacagcagcaactccggcgtgaagatcgacagagacaacagcatctcttctagcacaaacgggaaccggagctggggcctggtggacctggaaaacctccgagaacctaccaacgaagtcgagatcctggcgagaatcagccccaaagaggtgaccaagcaggcaataagcctaaacatcacagaacctaccgtgcagaccctggaggcccctgacgtgaacccccaggtgaacgagcctctgcctgcccctgtgatagacctgcccgaagtagaaacggtgaccatcaaccctctgactatcaacgctcctgacgctcctaccgcgccttctgcgcctacaatcaacatcggcataacagcccccagcgcgcctagcgcccctaccatcaacgtggtgcccaccagcccctccacacctagcgcccctacgatcaacatcggcatccaacctcctagcatcacccctctgagcatcaccacgcctgacagcgttgacgccccaaacgtcgtatctccgcagatcaagccggtcgacttcacagtggaccctggcggggacagcaacgcttactctagcgagaagcacaacagccaccagggctggaaggccagctggtccaagaccatcaacgtgacagagctgaccaaccggaactacgtgtccctgacaagagacaccgctgactcgaccatcccaacagaccaggtgataaacgtgaccaaagagaacaacagagccatggtggttgacgaggtgagaaagaacgggatcgtagtggacttcaagggcaccatcaacctgcagagaagccagaacgtgggcatcgacctgcaaggtacacaccagggcagcaagagcgacccactgatcgccaacatctacaactccggaaagatcatcggcaacgccaaatacggaagcacggccaacaaggagcagatcgccttcggattcaacaacgccgacggctccaacaacacgaccatgaccaacatggtgaacaaaggagagataacactgaacgcgccttcctccgccggtatccaactgaagcctgaagacccccacgactggcagcctaactcttggaacgccgcgccactgcaaatcgacaacaagacgcccaacaaaatcaagggcagagtgctgatgaaggctgacaaccagaaagacataaacctgaacggctcaggcagcttcggcatggtcaccgtgttcaacgagggcgtacccaagagactgttcgcacccagctacgtaacaaactacgagaacttgcggtccgagcggacatacgacggcgagagagtgctgccaggcggcgagatcggccggagcgctctgtctgactctaaatacacatccggcgtgtacaacaccggcaacatcaacatcaacggtgacagctctatcggcgtgggcctgctgcaggagatacaggaggtgaagctcgccgggaacatcaacataggcaccaaggctgttacacaggagactggcatcagcaacctgcccaacgccgggtcgaaaacctacagcatcaacaaggtcgaagaggccgtgggagtgttcgccggcgtccctacgatgcctgtgaagcctggcgagacagacaccctgatcaacggctctggcgcaagaaacacagccacttccttggtgggcaccgagacagtggagatcaacggaaacatcagcctcggcgagcacgcgacccagtcaatcggcgccctggtgggcgacacggaagtggacctcaacaagggtcagctgaccgagaacggcgtaaacaaaggctctaacgccgacagaaagctgaagagaagcggggacatcacagcaaagagcaacagcatcatcaacgtgggcggaaaaaagaactacggattcgtggtgtctaactcagcccacagcagcaagttcggcacaaccgtggacagcctcgagtacaaggtggacaaaacccaccacggaaaaggcatcaacgaaggcaaaatcaacgtaacgggcgacgagtccgttggtttcgccatgatcaagggaggcgacagcaagagcagcggcatcatctctgtaggcaacaacgcggagaactccatcggcttctacggcaaggaggactccttcaccaacagcgggacaatagaggtgacgagcgcaaagaagaagaacaaggccgtagtgctggacgggacaaacgcttctaacaagatcaacttcaccaacaccggtaacatatacgtcaacactagcgacaacggaaacaagaacttggacggggacggcaacatcggtatctacgcccaaggtaactacaaaatcgagcacaacagcggcatcgtcaaggccggaaaggacgccatcgccttctacgtgaaaaactcaacaggagaagtgaacatcaacgcccctatcgagctggctaacagcaacaaggcaactactatcgggatctacagcgacggcgacgccaaggtaaaattcggggccagctcctcacttaagatcggggaaaaggctgtggggctctacagcgccgaccccacaaagttcaacaacacattcgaaatcgaaaccggcaagacactgaacgtggagctaggtaagaacagcacattcggccttctgaacggcaacaaaaacgttactaactccccactgctgtcaaagtacctgaacaacaacaccacggacggcggaggctctggaggagggtccggagggggctcagaaagccaggtgcggcagcagttcagcaaagatatcattaagctgctgaacgagcaagtgaacaaggaaatgaacagcagcaacctgtacatgtctatgagctcttggtgctacacccacagcctggacggcgccggcctgttcctgttcgaccacgccgctgaagaatacgagcacgctaaaaagctgatcatcttcctgaacgaaaacaacgtgcccgtgcagctgaccagcatctccgcccctgagcacaagttcgagggcctcacccagatcttccagaaggcctacgagcacgaacaacacatcagcgagagcatcaacaacatcgtggaccacgccatcaagtccaaggaccacgccacattcaacttcctgcagtggtacgtcgccgagcagcacgaggaagaggtgctgttcaaggacatcctggacaagatcgagctgatcggaaacgagaaccacggcctgtacctggccgaccagtacgtgaagggcatcgccaaaagcagaaagagctgatga

SEQ ID NO: 29 - DNA, 3300 bp, Fusobacterium nucleatum
  source 1..3300: mol_type = other DNA
atggaaacagacacattgctgctatgggtcctgctgctctgggttccaggctccactggtgacgaagtgaacactgagcaaatgaaggtggtgccaacacgcgaagagatcgtctcgagcaaagagaacctgaagaactccgtcggaggactgcagaccaaaatcaacgacgccagatccgaaaacgaaaaggcgctgaaggggctgagactggagctaatacagctgatggaacagggaaaccaagtggtcaagtccccttggtcctcttggcagttcggcatgaactacttctacgaccactggggaagcgaatacaaggggcggggggacaagccccagaagtacctgttcaacggaatctacaccagaggtaactggaaagtgcggaacgccatggacgtagccgagaaccagagagttggtggaagacccctgacgcctggcaacgactctctgaacagctggaagaacgctaacaacagcagcaactccggcgtgaagatcgacagagacaacagcatctcttctagcacaaacgggaaccggagctggggcctggtggacctggaaaacctccgagaacctaccaacgaagtcgagatcctggcgagaatcagccccaaagaggtgaccaagcaggcaataagcctaaacatcacagaacctaccgtgcagaccctggaggcccctgacgtgaacccccaggtgaacgagcctctgcctgcccctgtgatagacctgcccgaagtagaaacggtgaccatcaaccctctgactatcaacgctcctgacgctcctaccgcgccttctgcgcctacaatcaacatcggcataacagcccccagcgcgcctagcgcccctaccatcaacgtggtgcccaccagcccctccacacctagcgcccctacgatcaacatcggcatccaacctcctagcatcacccctctgagcatcaccacgcctgacagcgttgacgccccaaacgtcgtatctccgcagatcaagccggtcgacttcacagtggaccctggcggggacagcaacgcttactctagcgagaagcacaacagccaccagggctggaaggccagctggtccaagaccatcaacgtgacagagctgaccaaccggaactacgtgtccctgacaagagacaccgctgactcgaccatcccaacagaccaggtgataaacgtgaccaaagagaacaacagagccatggtggttgacgaggtgagaaagaacgggatcgtagtggacttcaagggcaccatcaacctgcagagaagccagaacgtgggcatcgacctgcaaggtacacaccagggcagcaagagcgacccactgatcgccaacatctacaactccggaaagatcatcggcaacgccaaatacggaagcacggccaacaaggagcagatcgccttcggattcaacaacgccgacggctccaacaacacgaccatgaccaacatggtgaacaaaggagagataacactgaacgcgccttcctccgccggtatccaactgaagcctgaagacccccacgactggcagcctaactcttggaacgccgcgccactgcaaatcgacaacaagacgcccaacaaaatcaagggcagagtgctgatgaaggctgacaaccagaaagacataaacctgaacggctcaggcagcttcggcatggtcaccgtgttcaacgagggcgtacccaagagactgttcgcacccagctacgtaacaaactacgagaacttgcggtccgagcggacatacgacggcgagagagtgctgccaggcggcgagatcggccggagcgctctgtctgactctaaatacacatccggcgtgtacaacaccggcaacatcaacatcaacggtgacagctctatcggcgtgggcctgctgcaggagatacaggaggtgaagctcgccgggaacatcaacataggcaccaaggctgttacacaggagactggcatcagcaacctgcccaacgccgggtcgaaaacctacagcatcaacaaggtcgaagaggccgtgggagtgttcgccggcgtccctacgatgcctgtgaagcctggcgagacagacaccctgatcaacggctctggcgcaagaaacacagccacttccttggtgggcaccgagacagtggagatcaacggaaacatcagcctcggcgagcacgcgacccagtcaatcggcgccctggtgggcgacacggaagtggacctcaacaagggtcagctgaccgagaacggcgtaaacaaaggctctaacgccgacagaaagctgaagagaagcggggacatcacagcaaagagcaacagcatcatcaacgtgggcggaaaaaagaactacggattcgtggtgtctaactcagcccacagcagcaagttcggcacaaccgtggacagcctcgagtacaaggtggacaaaacccaccacggaaaaggcatcaacgaaggcaaaatcaacgtaacgggcgacgagtccgttggtttcgccatgatcaagggaggcgacagcaagagcagcggcatcatctctgtaggcaacaacgcggagaactccatcggcttctacggcaaggaggactccttcaccaacagcgggacaatagaggtgacgagcgcaaagaagaagaacaaggccgtagtgctggacgggacaaacgcttctaacaagatcaacttcaccaacaccggtaacatatacgtcaacactagcgacaacggaaacaagaacttggacggggacggcaacatcggtatctacgcccaaggtaactacaaaatcgagcacaacagcggcatcgtcaaggccggaaaggacgccatcgccttctacgtgaaaaactcaacaggagaagtgaacatcaacgcccctatcgagctggctaacagcaacaaggcaactactatcgggatctacagcgacggcgacgccaaggtaaaattcggggccagctcctcacttaagatcggggaaaaggctgtggggctctacagcgccgaccccacaaagttcaacaacacattcgaaatcgaaaccggcaagacactgaacgtggagctaggtaagaacagcacattcggccttctgaacggcaacaaaaacgttactaactccccactgctgtcaaagtacctgaacaacaacaccacggacggcggaggctctggaggagggtccggagggggctcaggctacatccccgaggcccctagagatggccaggcctacgtgcggaaggacggagaatgggtgctgctgagcaccttcctgtgatga

SEQ ID NO: 30 - DNA, 3834 bp, Fusobacterium nucleatum
  source 1..3834: mol_type = other DNA
atggaaacagacacattgctgctatgggtcctgctgctctgggttccaggctccactggtgacgaagtgaacactgagcaaatgaaggtggtgccaacacgcgaagagatcgtctcgagcaaagagaacctgaagaactccgtcggaggactgcagaccaaaatcaacgacgccagatccgaaaacgaaaaggcgctgaaggggctgagactggagctaatacagctgatggaacagggaaaccaagtggtcaagtccccttggtcctcttggcagttcggcatgaactacttctacgaccactggggaagcgaatacaaggggcggggggacaagccccagaagtacctgttcaacggaatctacaccagaggtaactggaaagtgcggaacgccatggacgtagccgagaaccagagagttggtggaagacccctgacgcctggcaacgactctctgaacagctggaagaacgctaacaacagcagcaactccggcgtgaagatcgacagagacaacagcatctcttctagcacaaacgggaaccggagctggggcctggtggacctggaaaacctccgagaacctaccaacgaagtcgagatcctggcgagaatcagccccaaagaggtgaccaagcaggcaataagcctaaacatcacagaacctaccgtgcagaccctggaggcccctgacgtgaacccccaggtgaacgagcctctgcctgcccctgtgatagacctgcccgaagtagaaacggtgaccatcaaccctctgactatcaacgctcctgacgctcctaccgcgccttctgcgcctacaatcaacatcggcataacagcccccagcgcgcctagcgcccctaccatcaacgtggtgcccaccagcccctccacacctagcgcccctacgatcaacatcggcatccaacctcctagcatcacccctctgagcatcaccacgcctgacagcgttgacgccccaaacgtcgtatctccgcagatcaagccggtcgacttcacagtggaccctggcggggacagcaacgcttactctagcgagaagcacaacagccaccagggctggaaggccagctggtccaagaccatcaacgtgacagagctgaccaaccggaactacgtgtccctgacaagagacaccgctgactcgaccatcccaacagaccaggtgataaacgtgaccaaagagaacaacagagccatggtggttgacgaggtgagaaagaacgggatcgtagtggacttcaagggcaccatcaacctgcagagaagccagaacgtgggcatcgacctgcaaggtacacaccagggcagcaagagcgacccactgatcgccaacatctacaactccggaaagatcatcggcaacgccaaatacggaagcacggccaacaaggagcagatcgccttcggattcaacaacgccgacggctccaacaacacgaccatgaccaacatggtgaacaaaggagagataacactgaacgcgccttcctccgccggtatccaactgaagcctgaagacccccacgactggcagcctaactcttggaacgccgcgccactgcaaatcgacaacaagacgcccaacaaaatcaagggcagagtgctgatgaaggctgacaaccagaaagacataaacctgaacggctcaggcagcttcggcatggtcaccgtgttcaacgagggcgtacccaagagactgttcgcacccagctacgtaacaaactacgagaacttgcggtccgagcggacatacgacggcgagagagtgctgccaggcggcgagatcggccggagcgctctgtctgactctaaatacacatccggcgtgtacaacaccggcaacatcaacatcaacggtgacagctctatcggcgtgggcctgctgcaggagatacaggaggtgaagctcgccgggaacatcaacataggcaccaaggctgttacacaggagactggcatcagcaacctgcccaacgccgggtcgaaaacctacagcatcaacaaggtcgaagaggccgtgggagtgttcgccggcgtccctacgatgcctgtgaagcctggcgagacagacaccctgatcaacggctctggcgcaagaaacacagccacttccttggtgggcaccgagacagtggagatcaacggaaacatcagcctcggcgagcacgcgacccagtcaatcggcgccctggtgggcgacacggaagtggacctcaacaagggtcagctgaccgagaacggcgtaaacaaaggctctaacgccgacagaaagctgaagagaagcggggacatcacagcaaagagcaacagcatcatcaacgtgggcggaaaaaagaactacggattcgtggtgtctaactcagcccacagcagcaagttcggcacaaccgtggacagcctcgagtacaaggtggacaaaacccaccacggaaaaggcatcaacgaaggcaaaatcaacgtaacgggcgacgagtccgttggtttcgccatgatcaagggaggcgacagcaagagcagcggcatcatctctgtaggcaacaacgcggagaactccatcggcttctacggcaaggaggactccttcaccaacagcgggacaatagaggtgacgagcgcaaagaagaagaacaaggccgtagtgctggacgggacaaacgcttctaacaagatcaacttcaccaacaccggtaacatatacgtcaacactagcgacaacggaaacaagaacttggacggggacggcaacatcggtatctacgcccaaggtaactacaaaatcgagcacaacagcggcatcgtcaaggccggaaaggacgccatcgccttctacgtgaaaaactcaacaggagaagtgaacatcaacgcccctatcgagctggctaacagcaacaaggcaactactatcgggatctacagcgacggcgacgccaaggtaaaattcggggccagctcctcacttaagatcggggaaaaggctgtggggctctacagcgccgaccccacaaagttcaacaacacattcgaaatcgaaaccggcaagacactgaacgtggagctaggtaagaacagcacattcggccttctgaacggcaacaaaaacgttactaactccccactgctgtcaaagtacctgaacaacaacaccacggacggcggaggctctggaggagggtccggagggggctcaatgaagatggaggagctgttcaagaagcacaagatcgtggccgtgctgagagccaacagcgtggaagaagccaagaaaaaggctctggccgtgttcctgggaggcgtgcacctgatcgagatcacattcaccgtgcccgacgccgacaccgtgatcaaggagctctctttcctgaaagagatgggcgccatcatcggcgccggcaccgtgacaagcgtggagcaggccagaaaggccgtcgagagcggcgctgaattcatcgtgtcccctcacctggacgaggaaatcagccagttcgccaaggagaagggcgtgttctacatgcctggcgtgatgacccctacagagctggtcaaggccatgaaactgggccacaccatcctgaagctgttccccggcgaggtggtgggcccccagttcgtgaaggctatgaaaggacctttccctaacgtgaagttcgtgccaaccggcggcgtgaacctggacaacgtttgcgaatggttcaaggccggagttctggccgtgggcgtcggatctgccctggtgaagggcacacctgtggaagtggccgagaaagctaaggccttcgtggaaaagatccggggctgcaccgagtgatga

SEQ ID NO: 31 - DNA, 3381 bp, Fusobacterium nucleatum
  source 1..3381: mol_type = other DNA
atggaaacagacacattgctgctatgggtcctgctgctctgggttccaggctccactggtgacgaagtgaacactgagcaaatgaaggtggtgccaacacgcgaagagatcgtctcgagcaaagagaacctgaagaactccgtcggaggactgcagaccaaaatcaacgacgccagatccgaaaacgaaaaggcgctgaaggggctgagactggagctaatacagctgatggaacagggaaaccaagtggtcaagtccccttggtcctcttggcagttcggcatgaactacttctacgaccactggggaagcgaatacaaggggcggggggacaagccccagaagtacctgttcaacggaatctacaccagaggtaactggaaagtgcggaacgccatggacgtagccgagaaccagagagttggtggaagacccctgacgcctggcaacgactctctgaacagctggaagaacgctaacaacagcagcaactccggcgtgaagatcgacagagacaacagcatctcttctagcacaaacgggaaccggagctggggcctggtggacctggaaaacctccgagaacctaccaacgaagtcgagatcctggcgagaatcagccccaaagaggtgaccaagcaggcaataagcctaaacatcacagaacctaccgtgcagaccctggaggcccctgacgtgaacccccaggtgaacgagcctctgcctgcccctgtgatagacctgcccgaagtagaaacggtgaccatcaaccctctgactatcaacgctcctgacgctcctaccgcgccttctgcgcctacaatcaacatcggcataacagcccccagcgcgcctagcgcccctaccatcaacgtggtgcccaccagcccctccacacctagcgcccctacgatcaacatcggcatccaacctcctagcatcacccctctgagcatcaccacgcctgacagcgttgacgccccaaacgtcgtatctccgcagatcaagccggtcgacttcacagtggaccctggcggggacagcaacgcttactctagcgagaagcacaacagccaccagggctggaaggccagctggtccaagaccatcaacgtgacagagctgaccaaccggaactacgtgtccctgacaagagacaccgctgactcgaccatcccaacagaccaggtgataaacgtgaccaaagagaacaacagagccatggtggttgacgaggtgagaaagaacgggatcgtagtggacttcaagggcaccatcaacctgcagagaagccagaacgtgggcatcgacctgcaaggtacacaccagggcagcaagagcgacccactgatcgccaacatctacaactccggaaagatcatcggcaacgccaaatacggaagcacggccaacaaggagcagatcgccttcggattcaacaacgccgacggctccaacaacacgaccatgaccaacatggtgaacaaaggagagataacactgaacgcgccttcctccgccggtatccaactgaagcctgaagacccccacgactggcagcctaactcttggaacgccgcgccactgcaaatcgacaacaagacgcccaacaaaatcaagggcagagtgctgatgaaggctgacaaccagaaagacataaacctgaacggctcaggcagcttcggcatggtcaccgtgttcaacgagggcgtacccaagagactgttcgcacccagctacgtaacaaactacgagaacttgcggtccgagcggacatacgacggcgagagagtgctgccaggcggcgagatcggccggagcgctctgtctgactctaaatacacatccggcgtgtacaacaccggcaacatcaacatcaacggtgacagctctatcggcgtgggcctgctgcaggagatacaggaggtgaagctcgccgggaacatcaacataggcaccaaggctgttacacaggagactggcatcagcaacctgcccaacgccgggtcgaaaacctacagcatcaacaaggtcgaagaggccgtgggagtgttcgccggcgtccctacgatgcctgtgaagcctggcgagacagacaccctgatcaacggctctggcgcaagaaacacagccacttccttggtgggcaccgagacagtggagatcaacggaaacatcagcctcggcgagcacgcgacccagtcaatcggcgccctggtgggcgacacggaagtggacctcaacaagggtcagctgaccgagaacggcgtaaacaaaggctctaacgccgacagaaagctgaagagaagcggggacatcacagcaaagagcaacagcatcatcaacgtgggcggaaaaaagaactacggattcgtggtgtctaactcagcccacagcagcaagttcggcacaaccgtggacagcctcgagtacaaggtggacaaaacccaccacggaaaaggcatcaacgaaggcaaaatcaacgtaacgggcgacgagtccgttggtttcgccatgatcaagggaggcgacagcaagagcagcggcatcatctctgtaggcaacaacgcggagaactccatcggcttctacggcaaggaggactccttcaccaacagcgggacaatagaggtgacgagcgcaaagaagaagaacaaggccgtagtgctggacgggacaaacgcttctaacaagatcaacttcaccaacaccggtaacatatacgtcaacactagcgacaacggaaacaagaacttggacggggacggcaacatcggtatctacgcccaaggtaactacaaaatcgagcacaacagcggcatcgtcaaggccggaaaggacgccatcgccttctacgtgaaaaactcaacaggagaagtgaacatcaacgcccctatcgagctggctaacagcaacaaggcaactactatcgggatctacagcgacggcgacgccaaggtaaaattcggggccagctcctcacttaagatcggggaaaaggctgtggggctctacagcgccgaccccacaaagttcaacaacacattcgaaatcgaaaccggcaagacactgaacgtggagctaggtaagaacagcacattcggccttctgaacggcaacaaaaacgttactaactccccactgctgtcaaagtacctgaacaacaacaccacggacggcggaggctctgctgtgggccaggacacgcaggaggtcatcgtggtgccacactccttgccctttaaggtggtggtcatcagcgccatcctggccctggtggtgctgaccatcatctctctgatcatcctgatcatgctgtggcagaaaaagcctagaggcggaggctctgcctggtcccacccccaattcgagaagtgatga

SEQ ID NO: 32 - DNA, 5253 bp, Fusobacterium nucleatum
  source 1..5253: mol_type = other DNA
atggaaacagacacattgctgctatgggtcctgctgctctgggttccaggctccactggtgacgaagtgaacactgagcaaatgaaggtggtgccaacacgcgaagagatcgtctcgagcaaagagaacctgaagaactccgtcggaggactgcagaccaaaatcaacgacgccagatccgaaaacgaaaaggcgctgaaggggctgagactggagctaatacagctgatggaacagggaaaccaagtggtcaagtccccttggtcctcttggcagttcggcatgaactacttctacgaccactggggaagcgaatacaaggggcggggggacaagccccagaagtacctgttcaacggaatctacaccagaggtaactggaaagtgcggaacgccatggacgtagccgagaaccagagagttggtggaagacccctgacgcctggcaacgactctctgaacagctggaagaacgctaacaacagcagcaactccggcgtgaagatcgacagagacaacagcatctcttctagcacaaacgggaaccggagctggggcctggtggacctggaaaacctccgagaacctaccaacgaagtcgagatcctggcgagaatcagccccaaagaggtgaccaagcaggcaataagcctaaacatcacagaacctaccgtgcagaccctggaggcccctgacgtgaacccccaggtgaacgagcctctgcctgcccctgtgatagacctgcccgaagtagaaacggtgaccatcaaccctctgactatcaacgctcctgacgctcctaccgcgccttctgcgcctacaatcaacatcggcataacagcccccagcgcgcctagcgcccctaccatcaacgtggtgcccaccagcccctccacacctagcgcccctacgatcaacatcggcatccaacctcctagcatcacccctctgagcatcaccacgcctgacagcgttgacgccccaaacgtcgtatctccgcagatcaagccggtcgacttcacagtggaccctggcggggacagcaacgcttactctagcgagaagcacaacagccaccagggctggaaggccagctggtccaagaccatcaacgtgacagagctgaccaaccggaactacgtgtccctgacaagagacaccgctgactcgaccatcccaacagaccaggtgataaacgtgaccaaagagaacaacagagccatggtggttgacgaggtgagaaagaacgggatcgtagtggacttcaagggcaccatcaacctgcagagaagccagaacgtgggcatcgacctgcaaggtacacaccagggcagcaagagcgacccactgatcgccaacatctacaactccggaaagatcatcggcaacgccaaatacggaagcacggccaacaaggagcagatcgccttcggattcaacaacgccgacggctccaacaacacgaccatgaccaacatggtgaacaaaggagagataacactgaacgcgccttcctccgccggtatccaactgaagcctgaagacccccacgactggcagcctaactcttggaacgccgcgccactgcaaatcgacaacaagacgcccaacaaaatcaagggcagagtgctgatgaaggctgacaaccagaaagacataaacctgaacggctcaggcagcttcggcatggtcaccgtgttcaacgagggcgtacccaagagactgttcgcacccagctacgtaacaaactacgagaacttgcggtccgagcggacatacgacggcgagagagtgctgccaggcggcgagatcggccggagcgctctgtctgactctaaatacacatccggcgtgtacaacaccggcaacatcaacatcaacggtgacagctctatcggcgtgggcctgctgcaggagatacaggaggtgaagctcgccgggaacatcaacataggcaccaaggctgttacacaggagactggcatcagcaacctgcccaacgccgggtcgaaaacctacagcatcaacaaggtcgaagaggccgtgggagtgttcgccggcgtccctacgatgcctgtgaagcctggcgagacagacaccctgatcaacggctctggcgcaagaaacacagccacttccttggtgggcaccgagacagtggagatcaacggaaacatcagcctcggcgagcacgcgacccagtcaatcggcgccctggtgggcgacacggaagtggacctcaacaagggtcagctgaccgagaacggcgtaaacaaaggctctaacgccgacagaaagctgaagagaagcggggacatcacagcaaagagcaacagcatcatcaacgtgggcggaaaaaagaactacggattcgtggtgtctaactcagcccacagcagcaagttcggcacaaccgtggacagcctcgagtacaaggtggacaaaacccaccacggaaaaggcatcaacgaaggcaaaatcaacgtaacgggcgacgagtccgttggtttcgccatgatcaagggaggcgacagcaagagcagcggcatcatctctgtaggcaacaacgcggagaactccatcggcttctacggcaaggaggactccttcaccaacagcgggacaatagaggtgacgagcgcaaagaagaagaacaaggccgtagtgctggacgggacaaacgcttctaacaagatcaacttcaccaacaccggtaacatatacgtcaacactagcgacaacggaaacaagaacttggacggggacggcaacatcggtatctacgcccaaggtaactacaaaatcgagcacaacagcggcatcgtcaaggccggaaaggacgccatcgccttctacgtgaaaaactcaacaggagaagtgaacatcaacgcccctatcgagctggctaacagcaacaaggcaactactatcgggatctacagcgacggcgacgccaaggtaaaattcggggccagctcctcacttaagatcggggaaaaggctgtggggctctacagcgccgaccccacaaagttcaacaacacattcgaaatcgaaaccggcaagacactgaacgtggagctaggtaagaacagcacattcggccttctgaacggcaacaaaaacgttactaactccccactgctgtcaaagtacctgaacaacaacaccacggacaagatcaacatcaccaagttcgacgaaggcgcctccctgttctacgccacactgaaggccaaggccatcctggacgaggactacaaggtgacaaacgctgacgccgctagcacctctgtcctagtggccaacgacggggccaacgtggagatcgccagcgggaagaagctggaaaccaacacaaacgtgggcctggtggccaccaagggggctggcgcctctctgagcacctcagttgcggaaaacaaggggacccttatctctactcggacagacaagggcatcggcatctacacgtacacagccaacggtgagaacagcggaaccatcatcatgaaaaaccagaactccgttgggatactgggctccggaggatccaacctgaagaacacagggaagatcgagctggaagctatcagcagcgccggcgtgtacgccgaaaacagcaacatgatcaacagcgggacagcatcagagatcgtagtgaaaaagaaggcgtccgtgggcatctacgcccgcgaaacaagcatcagctctgtgccaaagaacgtgaaaaacgaggggaaaatcgagataaaagccgacggcgacgggaaatccgccggcatctactcgaagaaggagggcggcgccaaactgaccatcgaaaacacggggaacatcgaggtcgctcaaaaagcatcggccggcatctacgcgaaaaacgaatctaaccaggccaacacagagtctgtcgtgaccaacagcggcttaatcaagatgagcgccgagaacagcatcggcatcatgggcgaaaagagcaaggtagaaaactcaggtaccggaacaaaggggatcgagatcgccggaaaaaagagcgcaggcatcctggtgacaaaggaatctgaagtggtgaactccggcaggatccttctggccaacaactcaatcctggcgagctctgacggcctcgttggcatcagcgttgacggcagcagcacgggcgagaacgacgcctcaggagagatcaagatcgacgccgcctactctacaggaatgctctcttctggaggcgacatcaccaacgcaggaaaaatcgacctggaaaaaaaggaatctataggcatctacgccacaaacgccaacgtgacaaacaacggggctaccacgaaaggcatcttcatcaaggacgaaaagagcgttggcatctacagcaagatcaacagctctagcacggccgacaagatcgtcacaaactctggtaccatcgacataggcggaacaagcaagaccgggtccgcgggcatctactctatcgtggagaacggagctactaagagactgagcacggtatcctcggggaacatcaccatctctcagaaggagtcagtgggtatctacgccaagaacaaatcaagccaggccaacatcgagtctgttgttacaaactcagggaacggcaagatcgaggtcaagaacgagggctctgccggcatcctggtggaaaagagcaaggttaccaacacagctgtaggcaccaacggcataatcgtgagcgccaagaagtctgccggaataatcgggaagctgggcagcgaaatcatcaactcaggcataatcaagactgaaacagccacaccaacggccgccgccgacggtgtcggcggaggctctggaggagggtccggagggggctcaatggccaacaaacctatgcagccaatcaccagcaccgcaaacaagatcgtgtggtccgaccctacaagactgagcaccaccttcagcgctagcctgctgagacaaagagtgaaagtgggcatcgccgagctgaacaacgtgtctggacagtacgtgtccgtgtacaagcggcccgcccctaagcctgagggctgcgccgacgcctgcgtgatcatgcctaacgagaaccagagcatccggaccgtgatcagcggcagcgctgaaaacctggccacactcaaggccgaatgggagacacacaagagaaacgtcgacaccctgttcgccagcggcaacgccggcctgggcttcctggaccccaccgccgctatcgtgtcttctgacaccacagcctgatga

SEQ ID NO: 33 - DNA, 5085 bp, Fusobacterium nucleatum
  source 1..5085: mol_type = other DNA
atggaaacagacacattgctgctatgggtcctgctgctctgggttccaggctccactggtgacgaagtgaacactgagcaaatgaaggtggtgccaacacgcgaagagatcgtctcgagcaaagagaacctgaagaactccgtcggaggactgcagaccaaaatcaacgacgccagatccgaaaacgaaaaggcgctgaaggggctgagactggagctaatacagctgatggaacagggaaaccaagtggtcaagtccccttggtcctcttggcagttcggcatgaactacttctacgaccactggggaagcgaatacaaggggcggggggacaagccccagaagtacctgttcaacggaatctacaccagaggtaactggaaagtgcggaacgccatggacgtagccgagaaccagagagttggtggaagacccctgacgcctggcaacgactctctgaacagctggaagaacgctaacaacagcagcaactccggcgtgaagatcgacagagacaacagcatctcttctagcacaaacgggaaccggagctggggcctggtggacctggaaaacctccgagaacctaccaacgaagtcgagatcctggcgagaatcagccccaaagaggtgaccaagcaggcaataagcctaaacatcacagaacctaccgtgcagaccctggaggcccctgacgtgaacccccaggtgaacgagcctctgcctgcccctgtgatagacctgcccgaagtagaaacggtgaccatcaaccctctgactatcaacgctcctgacgctcctaccgcgccttctgcgcctacaatcaacatcggcataacagcccccagcgcgcctagcgcccctaccatcaacgtggtgcccaccagcccctccacacctagcgcccctacgatcaacatcggcatccaacctcctagcatcacccctctgagcatcaccacgcctgacagcgttgacgccccaaacgtcgtatctccgcagatcaagccggtcgacttcacagtggaccctggcggggacagcaacgcttactctagcgagaagcacaacagccaccagggctggaaggccagctggtccaagaccatcaacgtgacagagctgaccaaccggaactacgtgtccctgacaagagacaccgctgactcgaccatcccaacagaccaggtgataaacgtgaccaaagagaacaacagagccatggtggttgacgaggtgagaaagaacgggatcgtagtggacttcaagggcaccatcaacctgcagagaagccagaacgtgggcatcgacctgcaaggtacacaccagggcagcaagagcgacccactgatcgccaacatctacaactccggaaagatcatcggcaacgccaaatacggaagcacggccaacaaggagcagatcgccttcggattcaacaacgccgacggctccaacaacacgaccatgaccaacatggtgaacaaaggagagataacactgaacgcgccttcctccgccggtatccaactgaagcctgaagacccccacgactggcagcctaactcttggaacgccgcgccactgcaaatcgacaacaagacgcccaacaaaatcaagggcagagtgctgatgaaggctgacaaccagaaagacataaacctgaacggctcaggcagcttcggcatggtcaccgtgttcaacgagggcgtacccaagagactgttcgcacccagctacgtaacaaactacgagaacttgcggtccgagcggacatacgacggcgagagagtgctgccaggcggcgagatcggccggagcgctctgtctgactctaaatacacatccggcgtgtacaacaccggcaacatcaacatcaacggtgacagctctatcggcgtgggcctgctgcaggagatacaggaggtgaagctcgccgggaacatcaacataggcaccaaggctgttacacaggagactggcatcagcaacctgcccaacgccgggtcgaaaacctacagcatcaacaaggtcgaagaggccgtgggagtgttcgccggcgtccctacgatgcctgtgaagcctggcgagacagacaccctgatcaacggctctggcgcaagaaacacagccacttccttggtgggcaccgagacagtggagatcaacggaaacatcagcctcggcgagcacgcgacccagtcaatcggcgccctggtgggcgacacggaagtggacctcaacaagggtcagctgaccgagaacggcgtaaacaaaggctctaacgccgacagaaagctgaagagaagcggggacatcacagcaaagagcaacagcatcatcaacgtgggcggaaaaaagaactacggattcgtggtgtctaactcagcccacagcagcaagttcggcacaaccgtggacagcctcgagtacaaggtggacaaaacccaccacggaaaaggcatcaacgaaggcaaaatcaacgtaacgggcgacgagtccgttggtttcgccatgatcaagggaggcgacagcaagagcagcggcatcatctctgtaggcaacaacgcggagaactccatcggcttctacggcaaggaggactccttcaccaacagcgggacaatagaggtgacgagcgcaaagaagaagaacaaggccgtagtgctggacgggacaaacgcttctaacaagatcaacttcaccaacaccggtaacatatacgtcaacactagcgacaacggaaacaagaacttggacggggacggcaacatcggtatctacgcccaaggtaactacaaaatcgagcacaacagcggcatcgtcaaggccggaaaggacgccatcgccttctacgtgaaaaactcaacaggagaagtgaacatcaacgcccctatcgagctggctaacagcaacaaggcaactactatcgggatctacagcgacggcgacgccaaggtaaaattcggggccagctcctcacttaagatcggggaaaaggctgtggggctctacagcgccgaccccacaaagttcaacaacacattcgaaatcgaaaccggcaagacactgaacgtggagctaggtaagaacagcacattcggccttctgaacggcaacaaaaacgttactaactccccactgctgtcaaagtacctgaacaacaacaccacggacaagatcaacatcaccaagttcgacgaaggcgcctccctgttctacgccacactgaaggccaaggccatcctggacgaggactacaaggtgacaaacgctgacgccgctagcacctctgtcctagtggccaacgacggggccaacgtggagatcgccagcgggaagaagctggaaaccaacacaaacgtgggcctggtggccaccaagggggctggcgcctctctgagcacctcagttgcggaaaacaaggggacccttatctctactcggacagacaagggcatcggcatctacacgtacacagccaacggtgagaacagcggaaccatcatcatgaaaaaccagaactccgttgggatactgggctccggaggatccaacctgaagaacacagggaagatcgagctggaagctatcagcagcgccggcgtgtacgccgaaaacagcaacatgatcaacagcgggacagcatcagagatcgtagtgaaaaagaaggcgtccgtgggcatctacgcccgcgaaacaagcatcagctctgtgccaaagaacgtgaaaaacgaggggaaaatcgagataaaagccgacggcgacgggaaatccgccggcatctactcgaagaaggagggcggcgccaaactgaccatcgaaaacacggggaacatcgaggtcgctcaaaaagcatcggccggcatctacgcgaaaaacgaatctaaccaggccaacacagagtctgtcgtgaccaacagcggcttaatcaagatgagcgccgagaacagcatcggcatcatgggcgaaaagagcaaggtagaaaactcaggtaccggaacaaaggggatcgagatcgccggaaaaaagagcgcaggcatcctggtgacaaaggaatctgaagtggtgaactccggcaggatccttctggccaacaactcaatcctggcgagctctgacggcctcgttggcatcagcgttgacggcagcagcacgggcgagaacgacgcctcaggagagatcaagatcgacgccgcctactctacaggaatgctctcttctggaggcgacatcaccaacgcaggaaaaatcgacctggaaaaaaaggaatctataggcatctacgccacaaacgccaacgtgacaaacaacggggctaccacgaaaggcatcttcatcaaggacgaaaagagcgttggcatctacagcaagatcaacagctctagcacggccgacaagatcgtcacaaactctggtaccatcgacataggcggaacaagcaagaccgggtccgcgggcatctactctatcgtggagaacggagctactaagagactgagcacggtatcctcggggaacatcaccatctctcagaaggagtcagtgggtatctacgccaagaacaaatcaagccaggccaacatcgagtctgttgttacaaactcagggaacggcaagatcgaggtcaagaacgagggctctgccggcatcctggtggaaaagagcaaggttaccaacacagctgtaggcaccaacggcataatcgtgagcgccaagaagtctgccggaataatcgggaagctgggcagcgaaatcatcaactcaggcataatcaagactgaaacagccacaccaacggccgccgccgacggtgtcggcggaggctctcccccagaagaccctcctgatagcaagaacaccctggtgctgttcggcgctggcttcggcgccgtgatcacagtggtggtgatcgtggtcatcatcaagtgcttctgcaagcacagatcttgcttcagacggaacgaggccagcagagagacaaacaacagcctgaccttcggacctgaggaagccctggccgagcagaccgtgttcctgggcggaggctctgcctggtcccacccccaattcgagaagtgatga

SEQ ID NO: 34 - DNA, 5622 bp, Fusobacterium nucleatum
  source 1..5622: mol_type = other DNA
atggaaacagacacattgctgctatgggtcctgctgctctgggttccaggctccactggtgacgaagtgaacactgagcaaatgaaggtggtgccaacacgcgaagagatcgtctcgagcaaagagaacctgaagaactccgtcggaggactgcagaccaaaatcaacgacgccagatccgaaaacgaaaaggcgctgaaggggctgagactggagctaatacagctgatggaacagggaaaccaagtggtcaagtccccttggtcctcttggcagttcggcatgaactacttctacgaccactggggaagcgaatacaaggggcggggggacaagccccagaagtacctgttcaacggaatctacaccagaggtaactggaaagtgcggaacgccatggacgtagccgagaaccagagagttggtggaagacccctgacgcctggcaacgactctctgaacagctggaagaacgctaacaacagcagcaactccggcgtgaagatcgacagagacaacagcatctcttctagcacaaacgggaaccggagctggggcctggtggacctggaaaacctccgagaacctaccaacgaagtcgagatcctggcgagaatcagccccaaagaggtgaccaagcaggcaataagcctaaacatcacagaacctaccgtgcagaccctggaggcccctgacgtgaacccccaggtgaacgagcctctgcctgcccctgtgatagacctgcccgaagtagaaacggtgaccatcaaccctctgactatcaacgctcctgacgctcctaccgcgccttctgcgcctacaatcaacatcggcataacagcccccagcgcgcctagcgcccctaccatcaacgtggtgcccaccagcccctccacacctagcgcccctacgatcaacatcggcatccaacctcctagcatcacccctctgagcatcaccacgcctgacagcgttgacgccccaaacgtcgtatctccgcagatcaagccggtcgacttcacagtggaccctggcggggacagcaacgcttactctagcgagaagcacaacagccaccagggctggaaggccagctggtccaagaccatcaacgtgacagagctgaccaaccggaactacgtgtccctgacaagagacaccgctgactcgaccatcccaacagaccaggtgataaacgtgaccaaagagaacaacagagccatggtggttgacgaggtgagaaagaacgggatcgtagtggacttcaagggcaccatcaacctgcagagaagccagaacgtgggcatcgacctgcaaggtacacaccagggcagcaagagcgacccactgatcgccaacatctacaactccggaaagatcatcggcaacgccaaatacggaagcacggccaacaaggagcagatcgccttcggattcaacaacgccgacggctccaacaacacgaccatgaccaacatggtgaacaaaggagagataacactgaacgcgccttcctccgccggtatccaactgaagcctgaagacccccacgactggcagcctaactcttggaacgccgcgccactgcaaatcgacaacaagacgcccaacaaaatcaagggcagagtgctgatgaaggctgacaaccagaaagacataaacctgaacggctcaggcagcttcggcatggtcaccgtgttcaacgagggcgtacccaagagactgttcgcacccagctacgtaacaaactacgagaacttgcggtccgagcggacatacgacggcgagagagtgctgccaggcggcgagatcggccggagcgctctgtctgactctaaatacacatccggcgtgtacaacaccggcaacatcaacatcaacggtgacagctctatcggcgtgggcctgctgcaggagatacaggaggtgaagctcgccgggaacatcaacataggcaccaaggctgttacacaggagactggcatcagcaacctgcccaacgccgggtcgaaaacctacagcatcaacaaggtcgaagaggccgtgggagtgttcgccggcgtccctacgatgcctgtgaagcctggcgagacagacaccctgatcaacggctctggcgcaagaaacacagccacttccttggtgggcaccgagacagtggagatcaacggaaacatcagcctcggcgagcacgcgacccagtcaatcggcgccctggtgggcgacacggaagtggacctcaacaagggtcagctgaccgagaacggcgtaaacaaaggctctaacgccgacagaaagctgaagagaagcggggacatcacagcaaagagcaacagcatcatcaacgtgggcggaaaaaagaactacggattcgtggtgtctaactcagcccacagcagcaagttcggcacaaccgtggacagcctcgagtacaaggtggacaaaacccaccacggaaaaggcatcaacgaaggcaaaatcaacgtaacgggcgacgagtccgttggtttcgccatgatcaagggaggcgacagcaagagcagcggcatcatctctgtaggcaacaacgcggagaactccatcggcttctacggcaaggaggactccttcaccaacagcgggacaatagaggtgacgagcgcaaagaagaagaacaaggccgtagtgctggacgggacaaacgcttctaacaagatcaacttcaccaacaccggtaacatatacgtcaacactagcgacaacggaaacaagaacttggacggggacggcaacatcggtatctacgcccaaggtaactacaaaatcgagcacaacagcggcatcgtcaaggccggaaaggacgccatcgccttctacgtgaaaaactcaacaggagaagtgaacatcaacgcccctatcgagctggctaacagcaacaaggcaactactatcgggatctacagcgacggcgacgccaaggtaaaattcggggccagctcctcacttaagatcggggaaaaggctgtggggctctacagcgccgaccccacaaagttcaacaacacattcgaaatcgaaaccggcaagacactgaacgtggagctaggtaagaacagcacattcggccttctgaacggcaacaaaaacgttactaactccccactgctgtcaaagtacctgaacaacaacaccacggacaagatcaacatcaccaagttcgacgaaggcgcctccctgttctacgccacactgaaggccaaggccatcctggacgaggactacaaggtgacaaacgctgacgccgctagcacctctgtcctagtggccaacgacggggccaacgtggagatcgccagcgggaagaagctggaaaccaacacaaacgtgggcctggtggccaccaagggggctggcgcctctctgagcacctcagttgcggaaaacaaggggacccttatctctactcggacagacaagggcatcggcatctacacgtacacagccaacggtgagaacagcggaaccatcatcatgaaaaaccagaactccgttgggatactgggctccggaggatccaacctgaagaacacagggaagatcgagctggaagctatcagcagcgccggcgtgtacgccgaaaacagcaacatgatcaacagcgggacagcatcagagatcgtagtgaaaaagaaggcgtccgtgggcatctacgcccgcgaaacaagcatcagctctgtgccaaagaacgtgaaaaacgaggggaaaatcgagataaaagccgacggcgacgggaaatccgccggcatctactcgaagaaggagggcggcgccaaactgaccatcgaaaacacggggaacatcgaggtcgctcaaaaagcatcggccggcatctacgcgaaaaacgaatctaaccaggccaacacagagtctgtcgtgaccaacagcggcttaatcaagatgagcgccgagaacagcatcggcatcatgggcgaaaagagcaaggtagaaaactcaggtaccggaacaaaggggatcgagatcgccggaaaaaagagcgcaggcatcctggtgacaaaggaatctgaagtggtgaactccggcaggatccttctggccaacaactcaatcctggcgagctctgacggcctcgttggcatcagcgttgacggcagcagcacgggcgagaacgacgcctcaggagagatcaagatcgacgccgcctactctacaggaatgctctcttctggaggcgacatcaccaacgcaggaaaaatcgacctggaaaaaaaggaatctataggcatctacgccacaaacgccaacgtgacaaacaacggggctaccacgaaaggcatcttcatcaaggacgaaaagagcgttggcatctacagcaagatcaacagctctagcacggccgacaagatcgtcacaaactctggtaccatcgacataggcggaacaagcaagaccgggtccgcgggcatctactctatcgtggagaacggagctactaagagactgagcacggtatcctcggggaacatcaccatctctcagaaggagtcagtgggtatctacgccaagaacaaatcaagccaggccaacatcgagtctgttgttacaaactcagggaacggcaagatcgaggtcaagaacgagggctctgccggcatcctggtggaaaagagcaaggttaccaacacagctgtaggcaccaacggcataatcgtgagcgccaagaagtctgccggaataatcgggaagctgggcagcgaaatcatcaactcaggcataatcaagactgaaacagccacaccaacggccgccgccgacggtgtcggcggaggctctggaggagggtccggagggggctcaccagccgccgccgaagaaaaggccgcccctgccgccgctaaacctgctacaaccgagggcgagttccccgagacacgggagaagatgagcggcatccgcagagccatcgccaaggccatggtgcacagcaaacacaccgcccctcacgttacactgatggacgaggccgacgtgaccaagctggtcgcccaccggaagaagttcaaggccatcgccgccgagaaaggcatcaaactgaccttcctgccttacgtggtgaaggccctggtgtccgccctcagagaataccccgtgctgaacaccagcatcgacgacgaaaccgaggaaatcatccagaagcactactacaacatcggcatcgcggctgacaccgacagaggcctgctggtgccagtgatcaagcacgccgacagaaagcccatcttcgccctggcccaggagatcaatgagctggctgaaaaagccagagacggaaagctgacacctggcgagatgaagggcgcttcttgcaccatcacaaacatcggaagcgccggcggacagtggttcacccctgtgatcaaccaccctgaggtggccatcctgggcatcggcagaatcgccgagaagcctatcgtgcgggacggcgaaatcgtggctgctcctatgctggccctgagcctgtctttcgaccacagaatgatcgacggcgccaccgcccaaaaggcacttaaccacatcaagcggctgctgagcgaccccgagctgctgctgatggaagcctgatga

SEQ ID NO: 35 - DNA, 5379 bp, Fusobacterium nucleatum
  source 1..5379: mol_type = other DNA
atggaaacagacacattgctgctatgggtcctgctgctctgggttccaggctccactggtgacgaagtgaacactgagcaaatgaaggtggtgccaacacgcgaagagatcgtctcgagcaaagagaacctgaagaactccgtcggaggactgcagaccaaaatcaacgacgccagatccgaaaacgaaaaggcgctgaaggggctgagactggagctaatacagctgatggaacagggaaaccaagtggtcaagtccccttggtcctcttggcagttcggcatgaactacttctacgaccactggggaagcgaatacaaggggcggggggacaagccccagaagtacctgttcaacggaatctacaccagaggtaactggaaagtgcggaacgccatggacgtagccgagaaccagagagttggtggaagacccctgacgcctggcaacgactctctgaacagctggaagaacgctaacaacagcagcaactccggcgtgaagatcgacagagacaacagcatctcttctagcacaaacgggaaccggagctggggcctggtggacctggaaaacctccgagaacctaccaacgaagtcgagatcctggcgagaatcagccccaaagaggtgaccaagcaggcaataagcctaaacatcacagaacctaccgtgcagaccctggaggcccctgacgtgaacccccaggtgaacgagcctctgcctgcccctgtgatagacctgcccgaagtagaaacggtgaccatcaaccctctgactatcaacgctcctgacgctcctaccgcgccttctgcgcctacaatcaacatcggcataacagcccccagcgcgcctagcgcccctaccatcaacgtggtgcccaccagcccctccacacctagcgcccctacgatcaacatcggcatccaacctcctagcatcacccctctgagcatcaccacgcctgacagcgttgacgccccaaacgtcgtatctccgcagatcaagccggtcgacttcacagtggaccctggcggggacagcaacgcttactctagcgagaagcacaacagccaccagggctggaaggccagctggtccaagaccatcaacgtgacagagctgaccaaccggaactacgtgtccctgacaagagacaccgctgactcgaccatcccaacagaccaggtgataaacgtgaccaaagagaacaacagagccatggtggttgacgaggtgagaaagaacgggatcgtagtggacttcaagggcaccatcaacctgcagagaagccagaacgtgggcatcgacctgcaaggtacacaccagggcagcaagagcgacccactgatcgccaacatctacaactccggaaagatcatcggcaacgccaaatacggaagcacggccaacaaggagcagatcgccttcggattcaacaacgccgacggctccaacaacacgaccatgaccaacatggtgaacaaaggagagataacactgaacgcgccttcctccgccggtatccaactgaagcctgaagacccccacgactggcagcctaactcttggaacgccgcgccactgcaaatcgacaacaagacgcccaacaaaatcaagggcagagtgctgatgaaggctgacaaccagaaagacataaacctgaacggctcaggcagcttcggcatggtcaccgtgttcaacgagggcgtacccaagagactgttcgcacccagctacgtaacaaactacgagaacttgcggtccgagcggacatacgacggcgagagagtgctgccaggcggcgagatcggccggagcgctctgtctgactctaaatacacatccggcgtgtacaacaccggcaacatcaacatcaacggtgacagctctatcggcgtgggcctgctgcaggagatacaggaggtgaagctcgccgggaacatcaacataggcaccaaggctgttacacaggagactggcatcagcaacctgcccaacgccgggtcgaaaacctacagcatcaacaaggtcgaagaggccgtgggagtgttcgccggcgtccctacgatgcctgtgaagcctggcgagacagacaccctgatcaacggctctggcgcaagaaacacagccacttccttggtgggcaccgagacagtggagatcaacggaaacatcagcctcggcgagcacgcgacccagtcaatcggcgccctggtgggcgacacggaagtggacctcaacaagggtcagctgaccgagaacggcgtaaacaaaggctctaacgccgacagaaagctgaagagaagcggggacatcacagcaaagagcaacagcatcatcaacgtgggcggaaaaaagaactacggattcgtggtgtctaactcagcccacagcagcaagttcggcacaaccgtggacagcctcgagtacaaggtggacaaaacccaccacggaaaaggcatcaacgaaggcaaaatcaacgtaacgggcgacgagtccgttggtttcgccatgatcaagggaggcgacagcaagagcagcggcatcatctctgtaggcaacaacgcggagaactccatcggcttctacggcaaggaggactccttcaccaacagcgggacaatagaggtgacgagcgcaaagaagaagaacaaggccgtagtgctggacgggacaaacgcttctaacaagatcaacttcaccaacaccggtaacatatacgtcaacactagcgacaacggaaacaagaacttggacggggacggcaacatcggtatctacgcccaaggtaactacaaaatcgagcacaacagcggcatcgtcaaggccggaaaggacgccatcgccttctacgtgaaaaactcaacaggagaagtgaacatcaacgcccctatcgagctggctaacagcaacaaggcaactactatcgggatctacagcgacggcgacgccaaggtaaaattcggggccagctcctcacttaagatcggggaaaaggctgtggggctctacagcgccgaccccacaaagttcaacaacacattcgaaatcgaaaccggcaagacactgaacgtggagctaggtaagaacagcacattcggccttctgaacggcaacaaaaacgttactaactccccactgctgtcaaagtacctgaacaacaacaccacggacaagatcaacatcaccaagttcgacgaaggcgcctccctgttctacgccacactgaaggccaaggccatcctggacgaggactacaaggtgacaaacgctgacgccgctagcacctctgtcctagtggccaacgacggggccaacgtggagatcgccagcgggaagaagctggaaaccaacacaaacgtgggcctggtggccaccaagggggctggcgcctctctgagcacctcagttgcggaaaacaaggggacccttatctctactcggacagacaagggcatcggcatctacacgtacacagccaacggtgagaacagcggaaccatcatcatgaaaaaccagaactccgttgggatactgggctccggaggatccaacctgaagaacacagggaagatcgagctggaagctatcagcagcgccggcgtgtacgccgaaaacagcaacatgatcaacagcgggacagcatcagagatcgtagtgaaaaagaaggcgtccgtgggcatctacgcccgcgaaacaagcatcagctctgtgccaaagaacgtgaaaaacgaggggaaaatcgagataaaagccgacggcgacgggaaatccgccggcatctactcgaagaaggagggcggcgccaaactgaccatcgaaaacacggggaacatcgaggtcgctcaaaaagcatcggccggcatctacgcgaaaaacgaatctaaccaggccaacacagagtctgtcgtgaccaacagcggcttaatcaagatgagcgccgagaacagcatcggcatcatgggcgaaaagagcaaggtagaaaactcaggtaccggaacaaaggggatcgagatcgccggaaaaaagagcgcaggcatcctggtgacaaaggaatctgaagtggtgaactccggcaggatccttctggccaacaactcaatcctggcgagctctgacggcctcgttggcatcagcgttgacggcagcagcacgggcgagaacgacgcctcaggagagatcaagatcgacgccgcctactctacaggaatgctctcttctggaggcgacatcaccaacgcaggaaaaatcgacctggaaaaaaaggaatctataggcatctacgccacaaacgccaacgtgacaaacaacggggctaccacgaaaggcatcttcatcaaggacgaaaagagcgttggcatctacagcaagatcaacagctctagcacggccgacaagatcgtcacaaactctggtaccatcgacataggcggaacaagcaagaccgggtccgcgggcatctactctatcgtggagaacggagctactaagagactgagcacggtatcctcggggaacatcaccatctctcagaaggagtcagtgggtatctacgccaagaacaaatcaagccaggccaacatcgagtctgttgttacaaactcagggaacggcaagatcgaggtcaagaacgagggctctgccggcatcctggtggaaaagagcaaggttaccaacacagctgtaggcaccaacggcataatcgtgagcgccaagaagtctgccggaataatcgggaagctgggcagcgaaatcatcaactcaggcataatcaagactgaaacagccacaccaacggccgccgccgacggtgtcggcggaggctctggaggagggtccggagggggctcagaaagccaggtgcggcagcagttcagcaaagatatcattaagctgctgaacgagcaagtgaacaaggaaatgaacagcagcaacctgtacatgtctatgagctcttggtgctacacccacagcctggacggcgccggcctgttcctgttcgaccacgccgctgaagaatacgagcacgctaaaaagctgatcatcttcctgaacgaaaacaacgtgcccgtgcagctgaccagcatctccgcccctgagcacaagttcgagggcctcacccagatcttccagaaggcctacgagcacgaacaacacatcagcgagagcatcaacaacatcgtggaccacgccatcaagtccaaggaccacgccacattcaacttcctgcagtggtacgtcgccgagcagcacgaggaagaggtgctgttcaaggacatcctggacaagatcgagctgatcggaaacgagaaccacggcctgtacctggccgaccagtacgtgaagggcatcgccaaaagcagaaagagctgatga

SEQ ID NO: 36 - DNA, 4941 bp, Fusobacterium nucleatum
  source 1..4941: mol_type = other DNA
atggaaacagacacattgctgctatgggtcctgctgctctgggttccaggctccactggtgacgaagtgaacactgagcaaatgaaggtggtgccaacacgcgaagagatcgtctcgagcaaagagaacctgaagaactccgtcggaggactgcagaccaaaatcaacgacgccagatccgaaaacgaaaaggcgctgaaggggctgagactggagctaatacagctgatggaacagggaaaccaagtggtcaagtccccttggtcctcttggcagttcggcatgaactacttctacgaccactggggaagcgaatacaaggggcggggggacaagccccagaagtacctgttcaacggaatctacaccagaggtaactggaaagtgcggaacgccatggacgtagccgagaaccagagagttggtggaagacccctgacgcctggcaacgactctctgaacagctggaagaacgctaacaacagcagcaactccggcgtgaagatcgacagagacaacagcatctcttctagcacaaacgggaaccggagctggggcctggtggacctggaaaacctccgagaacctaccaacgaagtcgagatcctggcgagaatcagccccaaagaggtgaccaagcaggcaataagcctaaacatcacagaacctaccgtgcagaccctggaggcccctgacgtgaacccccaggtgaacgagcctctgcctgcccctgtgatagacctgcccgaagtagaaacggtgaccatcaaccctctgactatcaacgctcctgacgctcctaccgcgccttctgcgcctacaatcaacatcggcataacagcccccagcgcgcctagcgcccctaccatcaacgtggtgcccaccagcccctccacacctagcgcccctacgatcaacatcggcatccaacctcctagcatcacccctctgagcatcaccacgcctgacagcgttgacgccccaaacgtcgtatctccgcagatcaagccggtcgacttcacagtggaccctggcggggacagcaacgcttactctagcgagaagcacaacagccaccagggctggaaggccagctggtccaagaccatcaacgtgacagagctgaccaaccggaactacgtgtccctgacaagagacaccgctgactcgaccatcccaacagaccaggtgataaacgtgaccaaagagaacaacagagccatggtggttgacgaggtgagaaagaacgggatcgtagtggacttcaagggcaccatcaacctgcagagaagccagaacgtgggcatcgacctgcaaggtacacaccagggcagcaagagcgacccactgatcgccaacatctacaactccggaaagatcatcggcaacgccaaatacggaagcacggccaacaaggagcagatcgccttcggattcaacaacgccgacggctccaacaacacgaccatgaccaacatggtgaacaaaggagagataacactgaacgcgccttcctccgccggtatccaactgaagcctgaagacccccacgactggcagcctaactcttggaacgccgcgccactgcaaatcgacaacaagacgcccaacaaaatcaagggcagagtgctgatgaaggctgacaaccagaaagacataaacctgaacggctcaggcagcttcggcatggtcaccgtgttcaacgagggcgtacccaagagactgttcgcacccagctacgtaacaaactacgagaacttgcggtccgagcggacatacgacggcgagagagtgctgccaggcggcgagatcggccggagcgctctgtctgactctaaatacacatccggcgtgtacaacaccggcaacatcaacatcaacggtgacagctctatcggcgtgggcctgctgcaggagatacaggaggtgaagctcgccgggaacatcaacataggcaccaaggctgttacacaggagactggcatcagcaacctgcccaacgccgggtcgaaaacctacagcatcaacaaggtcgaagaggccgtgggagtgttcgccggcgtccctacgatgcctgtgaagcctggcgagacagacaccctgatcaacggctctggcgcaagaaacacagccacttccttggtgggcaccgagacagtggagatcaacggaaacatcagcctcggcgagcacgcgacccagtcaatcggcgccctggtgggcgacacggaagtggacctcaacaagggtcagctgaccgagaacggcgtaaacaaaggctctaacgccgacagaaagctgaagagaagcggggacatcacagcaaagagcaacagcatcatcaacgtgggcggaaaaaagaactacggattcgtggtgtctaactcagcccacagcagcaagttcggcacaaccgtggacagcctcgagtacaaggtggacaaaacccaccacggaaaaggcatcaacgaaggcaaaatcaacgtaacgggcgacgagtccgttggtttcgccatgatcaagggaggcgacagcaagagcagcggcatcatctctgtaggcaacaacgcggagaactccatcggcttctacggcaaggaggactccttcaccaacagcgggacaatagaggtgacgagcgcaaagaagaagaacaaggccgtagtgctggacgggacaaacgcttctaacaagatcaacttcaccaacaccggtaacatatacgtcaacactagcgacaacggaaacaagaacttggacggggacggcaacatcggtatctacgcccaaggtaactacaaaatcgagcacaacagcggcatcgtcaaggccggaaaggacgccatcgccttctacgtgaaaaactcaacaggagaagtgaacatcaacgcccctatcgagctggctaacagcaacaaggcaactactatcgggatctacagcgacggcgacgccaaggtaaaattcggggccagctcctcacttaagatcggggaaaaggctgtggggctctacagcgccgaccccacaaagttcaacaacacattcgaaatcgaaaccggcaagacactgaacgtggagctaggtaagaacagcacattcggccttctgaacggcaacaaaaacgttactaactccccactgctgtcaaagtacctgaacaacaacaccacggacaagatcaacatcaccaagttcgacgaaggcgcctccctgttctacgccacactgaaggccaaggccatcctggacgaggactacaaggtgacaaacgctgacgccgctagcacctctgtcctagtggccaacgacggggccaacgtggagatcgccagcgggaagaagctggaaaccaacacaaacgtgggcctggtggccaccaagggggctggcgcctctctgagcacctcagttgcggaaaacaaggggacccttatctctactcggacagacaagggcatcggcatctacacgtacacagccaacggtgagaacagcggaaccatcatcatgaaaaaccagaactccgttgggatactgggctccggaggatccaacctgaagaacacagggaagatcgagctggaagctatcagcagcgccggcgtgtacgccgaaaacagcaacatgatcaacagcgggacagcatcagagatcgtagtgaaaaagaaggcgtccgtgggcatctacgcccgcgaaacaagcatcagctctgtgccaaagaacgtgaaaaacgaggggaaaatcgagataaaagccgacggcgacgggaaatccgccggcatctactcgaagaaggagggcggcgccaaactgaccatcgaaaacacggggaacatcgaggtcgctcaaaaagcatcggccggcatctacgcgaaaaacgaatctaaccaggccaacacagagtctgtcgtgaccaacagcggcttaatcaagatgagcgccgagaacagcatcggcatcatgggcgaaaagagcaaggtagaaaactcaggtaccggaacaaaggggatcgagatcgccggaaaaaagagcgcaggcatcctggtgacaaaggaatctgaagtggtgaactccggcaggatccttctggccaacaactcaatcctggcgagctctgacggcctcgttggcatcagcgttgacggcagcagcacgggcgagaacgacgcctcaggagagatcaagatcgacgccgcctactctacaggaatgctctcttctggaggcgacatcaccaacgcaggaaaaatcgacctggaaaaaaaggaatctataggcatctacgccacaaacgccaacgtgacaaacaacggggctaccacgaaaggcatcttcatcaaggacgaaaagagcgttggcatctacagcaagatcaacagctctagcacggccgacaagatcgtcacaaactctggtaccatcgacataggcggaacaagcaagaccgggtccgcgggcatctactctatcgtggagaacggagctactaagagactgagcacggtatcctcggggaacatcaccatctctcagaaggagtcagtgggtatctacgccaagaacaaatcaagccaggccaacatcgagtctgttgttacaaactcagggaacggcaagatcgaggtcaagaacgagggctctgccggcatcctggtggaaaagagcaaggttaccaacacagctgtaggcaccaacggcataatcgtgagcgccaagaagtctgccggaataatcgggaagctgggcagcgaaatcatcaactcaggcataatcaagactgaaacagccacaccaacggccgccgccgacggtgtcggcggaggctctggaggagggtccggagggggctcaggctacatccccgaggcccctagagatggccaggcctacgtgcggaaggacggagaatgggtgctgctgagcaccttcctgtgatga

SEQ ID NO: 37 - DNA, 5475 bp, Fusobacterium nucleatum
  source 1..5475: mol_type = other DNA
atggaaacagacacattgctgctatgggtcctgctgctctgggttccaggctccactggtgacgaagtgaacactgagcaaatgaaggtggtgccaacacgcgaagagatcgtctcgagcaaagagaacctgaagaactccgtcggaggactgcagaccaaaatcaacgacgccagatccgaaaacgaaaaggcgctgaaggggctgagactggagctaatacagctgatggaacagggaaaccaagtggtcaagtccccttggtcctcttggcagttcggcatgaactacttctacgaccactggggaagcgaatacaaggggcggggggacaagccccagaagtacctgttcaacggaatctacaccagaggtaactggaaagtgcggaacgccatggacgtagccgagaaccagagagttggtggaagacccctgacgcctggcaacgactctctgaacagctggaagaacgctaacaacagcagcaactccggcgtgaagatcgacagagacaacagcatctcttctagcacaaacgggaaccggagctggggcctggtggacctggaaaacctccgagaacctaccaacgaagtcgagatcctggcgagaatcagccccaaagaggtgaccaagcaggcaataagcctaaacatcacagaacctaccgtgcagaccctggaggcccctgacgtgaacccccaggtgaacgagcctctgcctgcccctgtgatagacctgcccgaagtagaaacggtgaccatcaaccctctgactatcaacgctcctgacgctcctaccgcgccttctgcgcctacaatcaacatcggcataacagcccccagcgcgcctagcgcccctaccatcaacgtggtgcccaccagcccctccacacctagcgcccctacgatcaacatcggcatccaacctcctagcatcacccctctgagcatcaccacgcctgacagcgttgacgccccaaacgtcgtatctccgcagatcaagccggtcgacttcacagtggaccctggcggggacagcaacgcttactctagcgagaagcacaacagccaccagggctggaaggccagctggtccaagaccatcaacgtgacagagctgaccaaccggaactacgtgtccctgacaagagacaccgctgactcgaccatcccaacagaccaggtgataaacgtgaccaaagagaacaacagagccatggtggttgacgaggtgagaaagaacgggatcgtagtggacttcaagggcaccatcaacctgcagagaagccagaacgtgggcatcgacctgcaaggtacacaccagggcagcaagagcgacccactgatcgccaacatctacaactccggaaagatcatcggcaacgccaaatacggaagcacggccaacaaggagcagatcgccttcggattcaacaacgccgacggctccaacaacacgaccatgaccaacatggtgaacaaaggagagataacactgaacgcgccttcctccgccggtatccaactgaagcctgaagacccccacgactggcagcctaactcttggaacgccgcgccactgcaaatcgacaacaagacgcccaacaaaatcaagggcagagtgctgatgaaggctgacaaccagaaagacataaacctgaacggctcaggcagcttcggcatggtcaccgtgttcaacgagggcgtacccaagagactgttcgcacccagctacgtaacaaactacgagaacttgcggtccgagcggacatacgacggcgagagagtgctgccaggcggcgagatcggccggagcgctctgtctgactctaaatacacatccggcgtgtacaacaccggcaacatcaacatcaacggtgacagctctatcggcgtgggcctgctgcaggagatacaggaggtgaagctcgccgggaacatcaacataggcaccaaggctgttacacaggagactggcatcagcaacctgcccaacgccgggtcgaaaacctacagcatcaacaaggtcgaagaggccgtgggagtgttcgccggcgtccctacgatgcctgtgaagcctggcgagacagacaccctgatcaacggctctggcgcaagaaacacagccacttccttggtgggcaccgagacagtggagatcaacggaaacatcagcctcggcgagcacgcgacccagtcaatcggcgccctggtgggcgacacggaagtggacctcaacaagggtcagctgaccgagaacggcgtaaacaaaggctctaacgccgacagaaagctgaagagaagcggggacatcacagcaaagagcaacagcatcatcaacgtgggcggaaaaaagaactacggattcgtggtgtctaactcagcccacagcagcaagttcggcacaaccgtggacagcctcgagtacaaggtggacaaaacccaccacggaaaaggcatcaacgaaggcaaaatcaacgtaacgggcgacgagtccgttggtttcgccatgatcaagggaggcgacagcaagagcagcggcatcatctctgtaggcaacaacgcggagaactccatcggcttctacggcaaggaggactccttcaccaacagcgggacaatagaggtgacgagcgcaaagaagaagaacaaggccgtagtgctggacgggacaaacgcttctaacaagatcaacttcaccaacaccggtaacatatacgtcaacactagcgacaacggaaacaagaacttggacggggacggcaacatcggtatctacgcccaaggtaactacaaaatcgagcacaacagcggcatcgtcaaggccggaaaggacgccatcgccttctacgtgaaaaactcaacaggagaagtgaacatcaacgcccctatcgagctggctaacagcaacaaggcaactactatcgggatctacagcgacggcgacgccaaggtaaaattcggggccagctcctcacttaagatcggggaaaaggctgtggggctctacagcgccgaccccacaaagttcaacaacacattcgaaatcgaaaccggcaagacactgaacgtggagctaggtaagaacagcacattcggccttctgaacggcaacaaaaacgttactaactccccactgctgtcaaagtacctgaacaacaacaccacggacaagatcaacatcaccaagttcgacgaaggcgcctccctgttctacgccacactgaaggccaaggccatcctggacgaggactacaaggtgacaaacgctgacgccgctagcacctctgtcctagtggccaacgacggggccaacgtggagatcgccagcgggaagaagctggaaaccaacacaaacgtgggcctggtggccaccaagggggctggcgcctctctgagcacctcagttgcggaaaacaaggggacccttatctctactcggacagacaagggcatcggcatctacacgtacacagccaacggtgagaacagcggaaccatcatcatgaaaaaccagaactccgttgggatactgggctccggaggatccaacctgaagaacacagggaagatcgagctggaagctatcagcagcgccggcgtgtacgccgaaaacagcaacatgatcaacagcgggacagcatcagagatcgtagtgaaaaagaaggcgtccgtgggcatctacgcccgcgaaacaagcatcagctctgtgccaaagaacgtgaaaaacgaggggaaaatcgagataaaagccgacggcgacgggaaatccgccggcatctactcgaagaaggagggcggcgccaaactgaccatcgaaaacacggggaacatcgaggtcgctcaaaaagcatcggccggcatctacgcgaaaaacgaatctaaccaggccaacacagagtctgtcgtgaccaacagcggcttaatcaagatgagcgccgagaacagcatcggcatcatgggcgaaaagagcaaggtagaaaactcaggtaccggaacaaaggggatcgagatcgccggaaaaaagagcgcaggcatcctggtgacaaaggaatctgaagtggtgaactccggcaggatccttctggccaacaactcaatcctggcgagctctgacggcctcgttggcatcagcgttgacggcagcagcacgggcgagaacgacgcctcaggagagatcaagatcgacgccgcctactctacaggaatgctctcttctggaggcgacatcaccaacgcaggaaaaatcgacctggaaaaaaaggaatctataggcatctacgccacaaacgccaacgtgacaaacaacggggctaccacgaaaggcatcttcatcaaggacgaaaagagcgttggcatctacagcaagatcaacagctctagcacggccgacaagatcgtcacaaactctggtaccatcgacataggcggaacaagcaagaccgggtccgcgggcatctactctatcgtggagaacggagctactaagagactgagcacggtatcctcggggaacatcaccatctctcagaaggagtcagtgggtatctacgccaagaacaaatcaagccaggccaacatcgagtctgttgttacaaactcagggaacggcaagatcgaggtcaagaacgagggctctgccggcatcctggtggaaaagagcaaggttaccaacacagctgtaggcaccaacggcataatcgtgagcgccaagaagtctgccggaataatcgggaagctgggcagcgaaatcatcaactcaggcataatcaagactgaaacagccacaccaacggccgccgccgacggtgtcggcggaggctctggaggagggtccggagggggctcaatgaagatggaggagctgttcaagaagcacaagatcgtggccgtgctgagagccaacagcgtggaagaagccaagaaaaaggctctggccgtgttcctgggaggcgtgcacctgatcgagatcacattcaccgtgcccgacgccgacaccgtgatcaaggagctctctttcctgaaagagatgggcgccatcatcggcgccggcaccgtgacaagcgtggagcaggccagaaaggccgtcgagagcggcgctgaattcatcgtgtcccctcacctggacgaggaaatcagccagttcgccaaggagaagggcgtgttctacatgcctggcgtgatgacccctacagagctggtcaaggccatgaaactgggccacaccatcctgaagctgttccccggcgaggtggtgggcccccagttcgtgaaggctatgaaaggacctttccctaacgtgaagttcgtgccaaccggcggcgtgaacctggacaacgtttgcgaatggttcaaggccggagttctggccgtgggcgtcggatctgccctggtgaagggcacacctgtggaagtggccgagaaagctaaggccttcgtggaaaagatccggggctgcaccgagtgatga

SEQ ID NO: 38 - DNA, 5022 bp, Fusobacterium nucleatum
  source 1..5022: mol_type = other DNA
atggaaacagacacattgctgctatgggtcctgctgctctgggttccaggctccactggtgacgaagtgaacactgagcaaatgaaggtggtgccaacacgcgaagagatcgtctcgagcaaagagaacctgaagaactccgtcggaggactgcagaccaaaatcaacgacgccagatccgaaaacgaaaaggcgctgaaggggctgagactggagctaatacagctgatggaacagggaaaccaagtggtcaagtccccttggtcctcttggcagttcggcatgaactacttctacgaccactggggaagcgaatacaaggggcggggggacaagccccagaagtacctgttcaacggaatctacaccagaggtaactggaaagtgcggaacgccatggacgtagccgagaaccagagagttggtggaagacccctgacgcctggcaacgactctctgaacagctggaagaacgctaacaacagcagcaactccggcgtgaagatcgacagagacaacagcatctcttctagcacaaacgggaaccggagctggggcctggtggacctggaaaacctccgagaacctaccaacgaagtcgagatcctggcgagaatcagccccaaagaggtgaccaagcaggcaataagcctaaacatcacagaacctaccgtgcagaccctggaggcccctgacgtgaacccccaggtgaacgagcctctgcctgcccctgtgatagacctgcccgaagtagaaacggtgaccatcaaccctctgactatcaacgctcctgacgctcctaccgcgccttctgcgcctacaatcaacatcggcataacagcccccagcgcgcctagcgcccctaccatcaacgtggtgcccaccagcccctccacacctagcgcccctacgatcaacatcggcatccaacctcctagcatcacccctctgagcatcaccacgcctgacagcgttgacgccccaaacgtcgtatctccgcagatcaagccggtcgacttcacagtggaccctggcggggacagcaacgcttactctagcgagaagcacaacagccaccagggctggaaggccagctggtccaagaccatcaacgtgacagagctgaccaaccggaactacgtgtccctgacaagagacaccgctgactcgaccatcccaacagaccaggtgataaacgtgaccaaagagaacaacagagccatggtggttgacgaggtgagaaagaacgggatcgtagtggacttcaagggcaccatcaacctgcagagaagccagaacgtgggcatcgacctgcaaggtacacaccagggcagcaagagcgacccactgatcgccaacatctacaactccggaaagatcatcggcaacgccaaatacggaagcacggccaacaaggagcagatcgccttcggattcaacaacgccgacggctccaacaacacgaccatgaccaacatggtgaacaaaggagagataacactgaacgcgccttcctccgccggtatccaactgaagcctgaagacccccacgactggcagcctaactcttggaacgccgcgccactgcaaatcgacaacaagacgcccaacaaaatcaagggcagagtgctgatgaaggctgacaaccagaaagacataaacctgaacggctcaggcagcttcggcatggtcaccgtgttcaacgagggcgtacccaagagactgttcgcacccagctacgtaacaaactacgagaacttgcggtccgagcggacatacgacggcgagagagtgctgccaggcggcgagatcggccggagcgctctgtctgactctaaatacacatccggcgtgtacaacaccggcaacatcaacatcaacggtgacagctctatcggcgtgggcctgctgcaggagatacaggaggtgaagctcgccgggaacatcaacataggcaccaaggctgttacacaggagactggcatcagcaacctgcccaacgccgggtcgaaaacctacagcatcaacaaggtcgaagaggccgtgggagtgttcgccggcgtccctacgatgcctgtgaagcctggcgagacagacaccctgatcaacggctctggcgcaagaaacacagccacttccttggtgggcaccgagacagtggagatcaacggaaacatcagcctcggcgagcacgcgacccagtcaatcggcgccctggtgggcgacacggaagtggacctcaacaagggtcagctgaccgagaacggcgtaaacaaaggctctaacgccgacagaaagctgaagagaagcggggacatcacagcaaagagcaacagcatcatcaacgtgggcggaaaaaagaactacggattcgtggtgtctaactcagcccacagcagcaagttcggcacaaccgtggacagcctcgagtacaaggtggacaaaacccaccacggaaaaggcatcaacgaaggcaaaatcaacgtaacgggcgacgagtccgttggtttcgccatgatcaagggaggcgacagcaagagcagcggcatcatctctgtaggcaacaacgcggagaactccatcggcttctacggcaaggaggactccttcaccaacagcgggacaatagaggtgacgagcgcaaagaagaagaacaaggccgtagtgctggacgggacaaacgcttctaacaagatcaacttcaccaacaccggtaacatatacgtcaacactagcgacaacggaaacaagaacttggacggggacggcaacatcggtatctacgcccaaggtaactacaaaatcgagcacaacagcggcatcgtcaaggccggaaaggacgccatcgccttctacgtgaaaaactcaacaggagaagtgaacatcaacgcccctatcgagctggctaacagcaacaaggcaactactatcgggatctacagcgacggcgacgccaaggtaaaattcggggccagctcctcacttaagatcggggaaaaggctgtggggctctacagcgccgaccccacaaagttcaacaacacattcgaaatcgaaaccggcaagacactgaacgtggagctaggtaagaacagcacattcggccttctgaacggcaacaaaaacgttactaactccccactgctgtcaaagtacctgaacaacaacaccacggacaagatcaacatcaccaagttcgacgaaggcgcctccctgttctacgccacactgaaggccaaggccatcctggacgaggactacaaggtgacaaacgctgacgccgctagcacctctgtcctagtggccaacgacggggccaacgtggagatcgccagcgggaagaagctggaaaccaacacaaacgtgggcctggtggccaccaagggggctggcgcctctctgagcacctcagttgcggaaaacaaggggacccttatctctactcggacagacaagggcatcggcatctacacgtacacagccaacggtgagaacagcggaaccatcatcatgaaaaaccagaactccgttgggatactgggctccggaggatccaacctgaagaacacagggaagatcgagctggaagctatcagcagcgccggcgtgtacgccgaaaacagcaacatgatcaacagcgggacagcatcagagatcgtagtgaaaaagaaggcgtccgtgggcatctacgcccgcgaaacaagcatcagctctgtgccaaagaacgtgaaaaacgaggggaaaatcgagataaaagccgacggcgacgggaaatccgccggcatctactcgaagaaggagggcggcgccaaactgaccatcgaaaacacggggaacatcgaggtcgctcaaaaagcatcggccggcatctacgcgaaaaacgaatctaaccaggccaacacagagtctgtcgtgaccaacagcggcttaatcaagatgagcgccgagaacagcatcggcatcatgggcgaaaagagcaaggtagaaaactcaggtaccggaacaaaggggatcgagatcgccggaaaaaagagcgcaggcatcctggtgacaaaggaatctgaagtggtgaactccggcaggatccttctggccaacaactcaatcctggcgagctctgacggcctcgttggcatcagcgttgacggcagcagcacgggcgagaacgacgcctcaggagagatcaagatcgacgccgcctactctacaggaatgctctcttctggaggcgacatcaccaacgcaggaaaaatcgacctggaaaaaaaggaatctataggcatctacgccacaaacgccaacgtgacaaacaacggggctaccacgaaaggcatcttcatcaaggacgaaaagagcgttggcatctacagcaagatcaacagctctagcacggccgacaagatcgtcacaaactctggtaccatcgacataggcggaacaagcaagaccgggtccgcgggcatctactctatcgtggagaacggagctactaagagactgagcacggtatcctcggggaacatcaccatctctcagaaggagtcagtgggtatctacgccaagaacaaatcaagccaggccaacatcgagtctgttgttacaaactcagggaacggcaagatcgaggtcaagaacgagggctctgccggcatcctggtggaaaagagcaaggttaccaacacagctgtaggcaccaacggcataatcgtgagcgccaagaagtctgccggaataatcgggaagctgggcagcgaaatcatcaactcaggcataatcaagactgaaacagccacaccaacggccgccgccgacggtgtcggcggaggctctgctgtgggccaggacacgcaggaggtcatcgtggtgccacactccttgccctttaaggtggtggtcatcagcgccatcctggccctggtggtgctgaccatcatctctctgatcatcctgatcatgctgtggcagaaaaagcctagaggcggaggctctgcctggtcccacccccaattcgagaagtgatga

SEQ ID NO: 39 - DNA, 7194 bp, Fusobacterium nucleatum
  source 1..7194: mol_type = other DNA
atggaaacagacacattgctgctatgggtcctgctgctctgggttccaggctccactggtgacgaagtgaacactgagcaaatgaaggtggtgccaacacgcgaagagatcgtctcgagcaaagagaacctgaagaactccgtcggaggactgcagaccaaaatcaacgacgccagatccgaaaacgaaaaggcgctgaaggggctgagactggagctaatacagctgatggaacagggaaaccaagtggtcaagtccccttggtcctcttggcagttcggcatgaactacttctacgaccactggggaagcgaatacaaggggcggggggacaagccccagaagtacctgttcaacggaatctacaccagaggtaactggaaagtgcggaacgccatggacgtagccgagaaccagagagttggtggaagacccctgacgcctggcaacgactctctgaacagctggaagaacgctaacaacagcagcaactccggcgtgaagatcgacagagacaacagcatctcttctagcacaaacgggaaccggagctggggcctggtggacctggaaaacctccgagaacctaccaacgaagtcgagatcctggcgagaatcagccccaaagaggtgaccaagcaggcaataagcctaaacatcacagaacctaccgtgcagaccctggaggcccctgacgtgaacccccaggtgaacgagcctctgcctgcccctgtgatagacctgcccgaagtagaaacggtgaccatcaaccctctgactatcaacgctcctgacgctcctaccgcgccttctgcgcctacaatcaacatcggcataacagcccccagcgcgcctagcgcccctaccatcaacgtggtgcccaccagcccctccacacctagcgcccctacgatcaacatcggcatccaacctcctagcatcacccctctgagcatcaccacgcctgacagcgttgacgccccaaacgtcgtatctccgcagatcaagccggtcgacttcacagtggaccctggcggggacagcaacgcttactctagcgagaagcacaacagccaccagggctggaaggccagctggtccaagaccatcaacgtgacagagctgaccaaccggaactacgtgtccctgacaagagacaccgctgactcgaccatcccaacagaccaggtgataaacgtgaccaaagagaacaacagagccatggtggttgacgaggtgagaaagaacgggatcgtagtggacttcaagggcaccatcaacctgcagagaagccagaacgtgggcatcgacctgcaaggtacacaccagggcagcaagagcgacccactgatcgccaacatctacaactccggaaagatcatcggcaacgccaaatacggaagcacggccaacaaggagcagatcgccttcggattcaacaacgccgacggctccaacaacacgaccatgaccaacatggtgaacaaaggagagataacactgaacgcgccttcctccgccggtatccaactgaagcctgaagacccccacgactggcagcctaactcttggaacgccgcgccactgcaaatcgacaacaagacgcccaacaaaatcaagggcagagtgctgatgaaggctgacaaccagaaagacataaacctgaacggctcaggcagcttcggcatggtcaccgtgttcaacgagggcgtacccaagagactgttcgcacccagctacgtaacaaactacgagaacttgcggtccgagcggacatacgacggcgagagagtgctgccaggcggcgagatcggccggagcgctctgtctgactctaaatacacatccggcgtgtacaacaccggcaacatcaacatcaacggtgacagctctatcggcgtgggcctgctgcaggagatacaggaggtgaagctcgccgggaacatcaacataggcaccaaggctgttacacaggagactggcatcagcaacctgcccaacgccgggtcgaaaacctacagcatcaacaaggtcgaagaggccgtgggagtgttcgccggcgtccctacgatgcctgtgaagcctggcgagacagacaccctgatcaacggctctggcgcaagaaacacagccacttccttggtgggcaccgagacagtggagatcaacggaaacatcagcctcggcgagcacgcgacccagtcaatcggcgccctggtgggcgacacggaagtggacctcaacaagggtcagctgaccgagaacggcgtaaacaaaggctctaacgccgacagaaagctgaagagaagcggggacatcacagcaaagagcaacagcatcatcaacgtgggcggaaaaaagaactacggattcgtggtgtctaactcagcccacagcagcaagttcggcacaaccgtggacagcctcgagtacaaggtggacaaaacccaccacggaaaaggcatcaacgaaggcaaaatcaacgtaacgggcgacgagtccgttggtttcgccatgatcaagggaggcgacagcaagagcagcggcatcatctctgtaggcaacaacgcggagaactccatcggcttctacggcaaggaggactccttcaccaacagcgggacaatagaggtgacgagcgcaaagaagaagaacaaggccgtagtgctggacgggacaaacgcttctaacaagatcaacttcaccaacaccggtaacatatacgtcaacactagcgacaacggaaacaagaacttggacggggacggcaacatcggtatctacgcccaaggtaactacaaaatcgagcacaacagcggcatcgtcaaggccggaaaggacgccatcgccttctacgtgaaaaactcaacaggagaagtgaacatcaacgcccctatcgagctggctaacagcaacaaggcaactactatcgggatctacagcgacggcgacgccaaggtaaaattcggggccagctcctcacttaagatcggggaaaaggctgtggggctctacagcgccgaccccacaaagttcaacaacacattcgaaatcgaaaccggcaagacactgaacgtggagctaggtaagaacagcacattcggccttctgaacggcaacaaaaacgttactaactccccactgctgtcaaagtacctgaacaacaacaccacggacaagatcaacatcaccaagttcgacgaaggcgcctccctgttctacgccacactgaaggccaaggccatcctggacgaggactacaaggtgacaaacgctgacgccgctagcacctctgtcctagtggccaacgacggggccaacgtggagatcgccagcgggaagaagctggaaaccaacacaaacgtgggcctggtggccaccaagggggctggcgcctctctgagcacctcagttgcggaaaacaaggggacccttatctctactcggacagacaagggcatcggcatctacacgtacacagccaacggtgagaacagcggaaccatcatcatgaaaaaccagaactccgttgggatactgggctccggaggatccaacctgaagaacacagggaagatcgagctggaagctatcagcagcgccggcgtgtacgccgaaaacagcaacatgatcaacagcgggacagcatcagagatcgtagtgaaaaagaaggcgtccgtgggcatctacgcccgcgaaacaagcatcagctctgtgccaaagaacgtgaaaaacgaggggaaaatcgagataaaagccgacggcgacgggaaatccgccggcatctactcgaagaaggagggcggcgccaaactgaccatcgaaaacacggggaacatcgaggtcgctcaaaaagcatcggccggcatctacgcgaaaaacgaatctaaccaggccaacacagagtctgtcgtgaccaacagcggcttaatcaagatgagcgccgagaacagcatcggcatcatgggcgaaaagagcaaggtagaaaactcaggtaccggaacaaaggggatcgagatcgccggaaaaaagagcgcaggcatcctggtgacaaaggaatctgaagtggtgaactccggcaggatccttctggccaacaactcaatcctggcgagctctgacggcctcgttggcatcagcgttgacggcagcagcacgggcgagaacgacgcctcaggagagatcaagatcgacgccgcctactctacaggaatgctctcttctggaggcgacatcaccaacgcaggaaaaatcgacctggaaaaaaaggaatctataggcatctacgccacaaacgccaacgtgacaaacaacggggctaccacgaaaggcatcttcatcaaggacgaaaagagcgttggcatctacagcaagatcaacagctctagcacggccgacaagatcgtcacaaactctggtaccatcgacataggcggaacaagcaagaccgggtccgcgggcatctactctatcgtggagaacggagctactaagagactgagcacggtatcctcggggaacatcaccatctctcagaaggagtcagtgggtatctacgccaagaacaaatcaagccaggccaacatcgagtctgttgttacaaactcagggaacggcaagatcgaggtcaagaacgagggctctgccggcatcctggtggaaaagagcaaggttaccaacacagctgtaggcaccaacggcataatcgtgagcgccaagaagtctgccggaataatcgggaagctgggcagcgaaatcatcaactcaggcataatcaagactgaaacagccacaccaacggccgccgccgacggtgtcgtcggcatcagcctgaacgcgtctaaggccaccaacgacagcaacggtacaatcacgctcgacacaaactacagcacaggcatgttcggtgagaacagctctacagcgataaacgaaggaaacatcacaggtaccaacaaggaaaacatagtcggcatggcgggtaaggccacaactgtcacaaacaagaagaccatcacgttgtccgccaaaaaatctactggcatcttcggcgaggacaacagcacgctcttgaacgacaccaacggcaacatcaccgtgaaggaagagtcctccgtcggcatctactcaaagggcaacaacaagatcgctgaaaacaagggcatcatcctcgccgaaaaaaagaagtctgccggaatgttgggttcagagggcaagctggagaacagcaacagcatcaccacccaggacgaggaaagcgccggaatgtacgtcgagaacagcagcgcaacaaacaaaaaaacaatcacagctaacggcaaaaagtcagcaggcgtgtacgtgaagctggacaaggctgccggaggcaccatcgcgggtacgaacgagggaaccaacgccaccatcacgatgacgaacgagggcagcgctgccatgctgggagaagtgaagtccctcgtgaccaacaactcggccactctgacactgaccaaccaaaacagcatcgtagtgaacaccaaggaaaccgtgggcatgatgatcactaacgacaccacaggcatccctaactccaacgtcaaggccctgaacacaggcaccatcgacctgaactccggcgctaccaacaaggacaacataggaatcctggccaacaagcgggccaccggaatcaacgagaagaacatcaacgtgaactccaaatcttctgtgggaatgctggctaaagagggttccaacatcgagaacaacaccaccttcagcaccatcaacctgaaggcagaatccggcatcggaatgctggccgacggcaaagacgcctctggcaacatatccacagccctgaacaacgctcggatagttgccacttccatcggcaagagatctctgggcatgctggcgcagaacaacggaaaagtcggcaacaacaaaaacatagacatcctggccgaaaacggagtgggcatcttcgtgagcgaaaccggcgtgggagagaacaccagcactggtactatcagcctggaaaacaaggagagcgtgggtatcttcgccaagaacaacggcaccaacgacaccgctaagaacagcggcactataaacctgggaaaggctgacggaagcacctctcacgagagcctgatcggcatgttcgcccaggccgagtccggtaagacagccagcgtgaagaacaccaaagacatcaacataaacaccaaaaagagcgttggcatgtacgccaaaaacgacgcctctaacatcaccgacgtggacctggaaaacaccggtgacataaacataaactcccaagagagcgcagggatctacgcccccaagtctaacatctcaaaggtgggaaccatcaccctgaaaaactccacagtgtctaacggcagcagcgctgtgtacgtgagcaacggaggaaaggtggccgacacagcatccgcgaagatcaacctcgggaaagtgaaccagaacagagtggcttactacgtgaacggtaaggactcagcgctcgccggcgccaacatcggcaagatcacagggtacggcgtgggagtatacctgcagggcgcgtctggagacaaggccaccctggactcgaacaccagcaaactggactacaccgcccagggcacaggcaacggcatcatcggcctactgctgaagggtgaaacagacatccagagctacatcaaaggcatcaaggttggtaacacggttcctagaagcaaccccagcgacaaagacaaatacgcaataggcggcggaggctctggaggagggtccggagggggctcaatggccaacaaacctatgcagccaatcaccagcaccgcaaacaagatcgtgtggtccgaccctacaagactgagcaccaccttcagcgctagcctgctgagacaaagagtgaaagtgggcatcgccgagctgaacaacgtgtctggacagtacgtgtccgtgtacaagcggcccgcccctaagcctgagggctgcgccgacgcctgcgtgatcatgcctaacgagaaccagagcatccggaccgtgatcagcggcagcgctgaaaacctggccacactcaaggccgaatgggagacacacaagagaaacgtcgacaccctgttcgccagcggcaacgccggcctgggcttcctggaccccaccgccgctatcgtgtcttctgacaccacagcctgatga

SEQ ID NO: 40 - DNA, 7026 bp, Fusobacterium nucleatum
  source 1..7026: mol_type = other DNA
atggaaacagacacattgctgctatgggtcctgctgctctgggttccaggctccactggtgacgaagtgaacactgagcaaatgaaggtggtgccaacacgcgaagagatcgtctcgagcaaagagaacctgaagaactccgtcggaggactgcagaccaaaatcaacgacgccagatccgaaaacgaaaaggcgctgaaggggctgagactggagctaatacagctgatggaacagggaaaccaagtggtcaagtccccttggtcctcttggcagttcggcatgaactacttctacgaccactggggaagcgaatacaaggggcggggggacaagccccagaagtacctgttcaacggaatctacaccagaggtaactggaaagtgcggaacgccatggacgtagccgagaaccagagagttggtggaagacccctgacgcctggcaacgactctctgaacagctggaagaacgctaacaacagcagcaactccggcgtgaagatcgacagagacaacagcatctcttctagcacaaacgggaaccggagctggggcctggtggacctggaaaacctccgagaacctaccaacgaagtcgagatcctggcgagaatcagccccaaagaggtgaccaagcaggcaataagcctaaacatcacagaacctaccgtgcagaccctggaggcccctgacgtgaacccccaggtgaacgagcctctgcctgcccctgtgatagacctgcccgaagtagaaacggtgaccatcaaccctctgactatcaacgctcctgacgctcctaccgcgccttctgcgcctacaatcaacatcggcataacagcccccagcgcgcctagcgcccctaccatcaacgtggtgcccaccagcccctccacacctagcgcccctacgatcaacatcggcatccaacctcctagcatcacccctctgagcatcaccacgcctgacagcgttgacgccccaaacgtcgtatctccgcagatcaagccggtcgacttcacagtggaccctggcggggacagcaacgcttactctagcgagaagcacaacagccaccagggctggaaggccagctggtccaagaccatcaacgtgacagagctgaccaaccggaactacgtgtccctgacaagagacaccgctgactcgaccatcccaacagaccaggtgataaacgtgaccaaagagaacaacagagccatggtggttgacgaggtgagaaagaacgggatcgtagtggacttcaagggcaccatcaacctgcagagaagccagaacgtgggcatcgacctgcaaggtacacaccagggcagcaagagcgacccactgatcgccaacatctacaactccggaaagatcatcggcaacgccaaatacggaagcacggccaacaaggagcagatcgccttcggattcaacaacgccgacggctccaacaacacgaccatgaccaacatggtgaacaaaggagagataacactgaacgcgccttcctccgccggtatccaactgaagcctgaagacccccacgactggcagcctaactcttggaacgccgcgccactgcaaatcgacaacaagacgcccaacaaaatcaagggcagagtgctgatgaaggctgacaaccagaaagacataaacctgaacggctcaggcagcttcggcatggtcaccgtgttcaacgagggcgtacccaagagactgttcgcacccagctacgtaacaaactacgagaacttgcggtccgagcggacatacgacggcgagagagtgctgccaggcggcgagatcggccggagcgctctgtctgactctaaatacacatccggcgtgtacaacaccggcaacatcaacatcaacggtgacagctctatcggcgtgggcctgctgcaggagatacaggaggtgaagctcgccgggaacatcaacataggcaccaaggctgttacacaggagactggcatcagcaacctgcccaacgccgggtcgaaaacctacagcatcaacaaggtcgaagaggccgtgggagtgttcgccggcgtccctacgatgcctgtgaagcctggcgagacagacaccctgatcaacggctctggcgcaagaaacacagccacttccttggtgggcaccgagacagtggagatcaacggaaacatcagcctcggcgagcacgcgacccagtcaatcggcgccctggtgggcgacacggaagtggacctcaacaagggtcagctgaccgagaacggcgtaaacaaaggctctaacgccgacagaaagctgaagagaagcggggacatcacagcaaagagcaacagcatcatcaacgtgggcggaaaaaagaactacggattcgtggtgtctaactcagcccacagcagcaagttcggcacaaccgtggacagcctcgagtacaaggtggacaaaacccaccacggaaaaggcatcaacgaaggcaaaatcaacgtaacgggcgacgagtccgttggtttcgccatgatcaagggaggcgacagcaagagcagcggcatcatctctgtaggcaacaacgcggagaactccatcggcttctacggcaaggaggactccttcaccaacagcgggacaatagaggtgacgagcgcaaagaagaagaacaaggccgtagtgctggacgggacaaacgcttctaacaagatcaacttcaccaacaccggtaacatatacgtcaacactagcgacaacggaaacaagaacttggacggggacggcaacatcggtatctacgcccaaggtaactacaaaatcgagcacaacagcggcatcgtcaaggccggaaaggacgccatcgccttctacgtgaaaaactcaacaggagaagtgaacatcaacgcccctatcgagctggctaacagcaacaaggcaactactatcgggatctacagcgacggcgacgccaaggtaaaattcggggccagctcctcacttaagatcggggaaaaggctgtggggctctacagcgccgaccccacaaagttcaacaacacattcgaaatcgaaaccggcaagacactgaacgtggagctaggtaagaacagcacattcggccttctgaacggcaacaaaaacgttactaactccccactgctgtcaaagtacctgaacaacaacaccacggacaagatcaacatcaccaagttcgacgaaggcgcctccctgttctacgccacactgaaggccaaggccatcctggacgaggactacaaggtgacaaacgctgacgccgctagcacctctgtcctagtggccaacgacggggccaacgtggagatcgccagcgggaagaagctggaaaccaacacaaacgtgggcctggtggccaccaagggggctggcgcctctctgagcacctcagttgcggaaaacaaggggacccttatctctactcggacagacaagggcatcggcatctacacgtacacagccaacggtgagaacagcggaaccatcatcatgaaaaaccagaactccgttgggatactgggctccggaggatccaacctgaagaacacagggaagatcgagctggaagctatcagcagcgccggcgtgtacgccgaaaacagcaacatgatcaacagcgggacagcatcagagatcgtagtgaaaaagaaggcgtccgtgggcatctacgcccgcgaaacaagcatcagctctgtgccaaagaacgtgaaaaacgaggggaaaatcgagataaaagccgacggcgacgggaaatccgccggcatctactcgaagaaggagggcggcgccaaactgaccatcgaaaacacggggaacatcgaggtcgctcaaaaagcatcggccggcatctacgcgaaaaacgaatctaaccaggccaacacagagtctgtcgtgaccaacagcggcttaatcaagatgagcgccgagaacagcatcggcatcatgggcgaaaagagcaaggtagaaaactcaggtaccggaacaaaggggatcgagatcgccggaaaaaagagcgcaggcatcctggtgacaaaggaatctgaagtggtgaactccggcaggatccttctggccaacaactcaatcctggcgagctctgacggcctcgttggcatcagcgttgacggcagcagcacgggcgagaacgacgcctcaggagagatcaagatcgacgccgcctactctacaggaatgctctcttctggaggcgacatcaccaacgcaggaaaaatcgacctggaaaaaaaggaatctataggcatctacgccacaaacgccaacgtgacaaacaacggggctaccacgaaaggcatcttcatcaaggacgaaaagagcgttggcatctacagcaagatcaacagctctagcacggccgacaagatcgtcacaaactctggtaccatcgacataggcggaacaagcaagaccgggtccgcgggcatctactctatcgtggagaacggagctactaagagactgagcacggtatcctcggggaacatcaccatctctcagaaggagtcagtgggtatctacgccaagaacaaatcaagccaggccaacatcgagtctgttgttacaaactcagggaacggcaagatcgaggtcaagaacgagggctctgccggcatcctggtggaaaagagcaaggttaccaacacagctgtaggcaccaacggcataatcgtgagcgccaagaagtctgccggaataatcgggaagctgggcagcgaaatcatcaactcaggcataatcaagactgaaacagccacaccaacggccgccgccgacggtgtcgtcggcatcagcctgaacgcgtctaaggccaccaacgacagcaacggtacaatcacgctcgacacaaactacagcacaggcatgttcggtgagaacagctctacagcgataaacgaaggaaacatcacaggtaccaacaaggaaaacatagtcggcatggcgggtaaggccacaactgtcacaaacaagaagaccatcacgttgtccgccaaaaaatctactggcatcttcggcgaggacaacagcacgctcttgaacgacaccaacggcaacatcaccgtgaaggaagagtcctccgtcggcatctactcaaagggcaacaacaagatcgctgaaaacaagggcatcatcctcgccgaaaaaaagaagtctgccggaatgttgggttcagagggcaagctggagaacagcaacagcatcaccacccaggacgaggaaagcgccggaatgtacgtcgagaacagcagcgcaacaaacaaaaaaacaatcacagctaacggcaaaaagtcagcaggcgtgtacgtgaagctggacaaggctgccggaggcaccatcgcgggtacgaacgagggaaccaacgccaccatcacgatgacgaacgagggcagcgctgccatgctgggagaagtgaagtccctcgtgaccaacaactcggccactctgacactgaccaaccaaaacagcatcgtagtgaacaccaaggaaaccgtgggcatgatgatcactaacgacaccacaggcatccctaactccaacgtcaaggccctgaacacaggcaccatcgacctgaactccggcgctaccaacaaggacaacataggaatcctggccaacaagcgggccaccggaatcaacgagaagaacatcaacgtgaactccaaatcttctgtgggaatgctggctaaagagggttccaacatcgagaacaacaccaccttcagcaccatcaacctgaaggcagaatccggcatcggaatgctggccgacggcaaagacgcctctggcaacatatccacagccctgaacaacgctcggatagttgccacttccatcggcaagagatctctgggcatgctggcgcagaacaacggaaaagtcggcaacaacaaaaacatagacatcctggccgaaaacggagtgggcatcttcgtgagcgaaaccggcgtgggagagaacaccagcactggtactatcagcctggaaaacaaggagagcgtgggtatcttcgccaagaacaacggcaccaacgacaccgctaagaacagcggcactataaacctgggaaaggctgacggaagcacctctcacgagagcctgatcggcatgttcgcccaggccgagtccggtaagacagccagcgtgaagaacaccaaagacatcaacataaacaccaaaaagagcgttggcatgtacgccaaaaacgacgcctctaacatcaccgacgtggacctggaaaacaccggtgacataaacataaactcccaagagagcgcagggatctacgcccccaagtctaacatctcaaaggtgggaaccatcaccctgaaaaactccacagtgtctaacggcagcagcgctgtgtacgtgagcaacggaggaaaggtggccgacacagcatccgcgaagatcaacctcgggaaagtgaaccagaacagagtggcttactacgtgaacggtaaggactcagcgctcgccggcgccaacatcggcaagatcacagggtacggcgtgggagtatacctgcagggcgcgtctggagacaaggccaccctggactcgaacaccagcaaactggactacaccgcccagggcacaggcaacggcatcatcggcctactgctgaagggtgaaacagacatccagagctacatcaaaggcatcaaggttggtaacacggttcctagaagcaaccccagcgacaaagacaaatacgcaataggcggcggaggctctcccccagaagaccctcctgatagcaagaacaccctggtgctgttcggcgctggcttcggcgccgtgatcacagtggtggtgatcgtggtcatcatcaagtgcttctgcaagcacagatcttgcttcagacggaacgaggccagcagagagacaaacaacagcctgaccttcggacctgaggaagccctggccgagcagaccgtgttcctgggcggaggctctgcctggtcccacccccaattcgagaagtgatga

SEQ ID NO: 41 - DNA, 7563 bp, Fusobacterium nucleatum
  source 1..7563: mol_type = other DNA
atggaaacagacacattgctgctatgggtcctgctgctctgggttccaggctccactggtgacgaagtgaacactgagcaaatgaaggtggtgccaacacgcgaagagatcgtctcgagcaaagagaacctgaagaactccgtcggaggactgcagaccaaaatcaacgacgccagatccgaaaacgaaaaggcgctgaaggggctgagactggagctaatacagctgatggaacagggaaaccaagtggtcaagtccccttggtcctcttggcagttcggcatgaactacttctacgaccactggggaagcgaatacaaggggcggggggacaagccccagaagtacctgttcaacggaatctacaccagaggtaactggaaagtgcggaacgccatggacgtagccgagaaccagagagttggtggaagacccctgacgcctggcaacgactctctgaacagctggaagaacgctaacaacagcagcaactccggcgtgaagatcgacagagacaacagcatctcttctagcacaaacgggaaccggagctggggcctggtggacctggaaaacctccgagaacctaccaacgaagtcgagatcctggcgagaatcagccccaaagaggtgaccaagcaggcaataagcctaaacatcacagaacctaccgtgcagaccctggaggcccctgacgtgaacccccaggtgaacgagcctctgcctgcccctgtgatagacctgcccgaagtagaaacggtgaccatcaaccctctgactatcaacgctcctgacgctcctaccgcgccttctgcgcctacaatcaacatcggcataacagcccccagcgcgcctagcgcccctaccatcaacgtggtgcccaccagcccctccacacctagcgcccctacgatcaacatcggcatccaacctcctagcatcacccctctgagcatcaccacgcctgacagcgttgacgccccaaacgtcgtatctccgcagatcaagccggtcgacttcacagtggaccctggcggggacagcaacgcttactctagcgagaagcacaacagccaccagggctggaaggccagctggtccaagaccatcaacgtgacagagctgaccaaccggaactacgtgtccctgacaagagacaccgctgactcgaccatcccaacagaccaggtgataaacgtgaccaaagagaacaacagagccatggtggttgacgaggtgagaaagaacgggatcgtagtggacttcaagggcaccatcaacctgcagagaagccagaacgtgggcatcgacctgcaaggtacacaccagggcagcaagagcgacccactgatcgccaacatctacaactccggaaagatcatcggcaacgccaaatacggaagcacggccaacaaggagcagatcgccttcggattcaacaacgccgacggctccaacaacacgaccatgaccaacatggtgaacaaaggagagataacactgaacgcgccttcctccgccggtatccaactgaagcctgaagacccccacgactggcagcctaactcttggaacgccgcgccactgcaaatcgacaacaagacgcccaacaaaatcaagggcagagtgctgatgaaggctgacaaccagaaagacataaacctgaacggctcaggcagcttcggcatggtcaccgtgttcaacgagggcgtacccaagagactgttcgcacccagctacgtaacaaactacgagaacttgcggtccgagcggacatacgacggcgagagagtgctgccaggcggcgagatcggccggagcgctctgtctgactctaaatacacatccggcgtgtacaacaccggcaacatcaacatcaacggtgacagctctatcggcgtgggcctgctgcaggagatacaggaggtgaagctcgccgggaacatcaacataggcaccaaggctgttacacaggagactggcatcagcaacctgcccaacgccgggtcgaaaacctacagcatcaacaaggtcgaagaggccgtgggagtgttcgccggcgtccctacgatgcctgtgaagcctggcgagacagacaccctgatcaacggctctggcgcaagaaacacagccacttccttggtgggcaccgagacagtggagatcaacggaaacatcagcctcggcgagcacgcgacccagtcaatcggcgccctggtgggcgacacggaagtggacctcaacaagggtcagctgaccgagaacggcgtaaacaaaggctctaacgccgacagaaagctgaagagaagcggggacatcacagcaaagagcaacagcatcatcaacgtgggcggaaaaaagaactacggattcgtggtgtctaactcagcccacagcagcaagttcggcacaaccgtggacagcctcgagtacaaggtggacaaaacccaccacggaaaaggcatcaacgaaggcaaaatcaacgtaacgggcgacgagtccgttggtttcgccatgatcaagggaggcgacagcaagagcagcggcatcatctctgtaggcaacaacgcggagaactccatcggcttctacggcaaggaggactccttcaccaacagcgggacaatagaggtgacgagcgcaaagaagaagaacaaggccgtagtgctggacgggacaaacgcttctaacaagatcaacttcaccaacaccggtaacatatacgtcaacactagcgacaacggaaacaagaacttggacggggacggcaacatcggtatctacgcccaaggtaactacaaaatcgagcacaacagcggcatcgtcaaggccggaaaggacgccatcgccttctacgtgaaaaactcaacaggagaagtgaacatcaacgcccctatcgagctggctaacagcaacaaggcaactactatcgggatctacagcgacggcgacgccaaggtaaaattcggggccagctcctcacttaagatcggggaaaaggctgtggggctctacagcgccgaccccacaaagttcaacaacacattcgaaatcgaaaccggcaagacactgaacgtggagctaggtaagaacagcacattcggccttctgaacggcaacaaaaacgttactaactccccactgctgtcaaagtacctgaacaacaacaccacggacaagatcaacatcaccaagttcgacgaaggcgcctccctgttctacgccacactgaaggccaaggccatcctggacgaggactacaaggtgacaaacgctgacgccgctagcacctctgtcctagtggccaacgacggggccaacgtggagatcgccagcgggaagaagctggaaaccaacacaaacgtgggcctggtggccaccaagggggctggcgcctctctgagcacctcagttgcggaaaacaaggggacccttatctctactcggacagacaagggcatcggcatctacacgtacacagccaacggtgagaacagcggaaccatcatcatgaaaaaccagaactccgttgggatactgggctccggaggatccaacctgaagaacacagggaagatcgagctggaagctatcagcagcgccggcgtgtacgccgaaaacagcaacatgatcaacagcgggacagcatcagagatcgtagtgaaaaagaaggcgtccgtgggcatctacgcccgcgaaacaagcatcagctctgtgccaaagaacgtgaaaaacgaggggaaaatcgagataaaagccgacggcgacgggaaatccgccggcatctactcgaagaaggagggcggcgccaaactgaccatcgaaaacacggggaacatcgaggtcgctcaaaaagcatcggccggcatctacgcgaaaaacgaatctaaccaggccaacacagagtctgtcgtgaccaacagcggcttaatcaagatgagcgccgagaacagcatcggcatcatgggcgaaaagagcaaggtagaaaactcaggtaccggaacaaaggggatcgagatcgccggaaaaaagagcgcaggcatcctggtgacaaaggaatctgaagtggtgaactccggcaggatccttctggccaacaactcaatcctggcgagctctgacggcctcgttggcatcagcgttgacggcagcagcacgggcgagaacgacgcctcaggagagatcaagatcgacgccgcctactctacaggaatgctctcttctggaggcgacatcaccaacgcaggaaaaatcgacctggaaaaaaaggaatctataggcatctacgccacaaacgccaacgtgacaaacaacggggctaccacgaaaggcatcttcatcaaggacgaaaagagcgttggcatctacagcaagatcaacagctctagcacggccgacaagatcgtcacaaactctggtaccatcgacataggcggaacaagcaagaccgggtccgcgggcatctactctatcgtggagaacggagctactaagagactgagcacggtatcctcggggaacatcaccatctctcagaaggagtcagtgggtatctacgccaagaacaaatcaagccaggccaacatcgagtctgttgttacaaactcagggaacggcaagatcgaggtcaagaacgagggctctgccggcatcctggtggaaaagagcaaggttaccaacacagctgtaggcaccaacggcataatcgtgagcgccaagaagtctgccggaataatcgggaagctgggcagcgaaatcatcaactcaggcataatcaagactgaaacagccacaccaacggccgccgccgacggtgtcgtcggcatcagcctgaacgcgtctaaggccaccaacgacagcaacggtacaatcacgctcgacacaaactacagcacaggcatgttcggtgagaacagctctacagcgataaacgaaggaaacatcacaggtaccaacaaggaaaacatagtcggcatggcgggtaaggccacaactgtcacaaacaagaagaccatcacgttgtccgccaaaaaatctactggcatcttcggcgaggacaacagcacgctcttgaacgacaccaacggcaacatcaccgtgaaggaagagtcctccgtcggcatctactcaaagggcaacaacaagatcgctgaaaacaagggcatcatcctcgccgaaaaaaagaagtctgccggaatgttgggttcagagggcaagctggagaacagcaacagcatcaccacccaggacgaggaaagcgccggaatgtacgtcgagaacagcagcgcaacaaacaaaaaaacaatcacagctaacggcaaaaagtcagcaggcgtgtacgtgaagctggacaaggctgccggaggcaccatcgcgggtacgaacgagggaaccaacgccaccatcacgatgacgaacgagggcagcgctgccatgctgggagaagtgaagtccctcgtgaccaacaactcggccactctgacactgaccaaccaaaacagcatcgtagtgaacaccaaggaaaccgtgggcatgatgatcactaacgacaccacaggcatccctaactccaacgtcaaggccctgaacacaggcaccatcgacctgaactccggcgctaccaacaaggacaacataggaatcctggccaacaagcgggccaccggaatcaacgagaagaacatcaacgtgaactccaaatcttctgtgggaatgctggctaaagagggttccaacatcgagaacaacaccaccttcagcaccatcaacctgaaggcagaatccggcatcggaatgctggccgacggcaaagacgcctctggcaacatatccacagccctgaacaacgctcggatagttgccacttccatcggcaagagatctctgggcatgctggcgcagaacaacggaaaagtcggcaacaacaaaaacatagacatcctggccgaaaacggagtgggcatcttcgtgagcgaaaccggcgtgggagagaacaccagcactggtactatcagcctggaaaacaaggagagcgtgggtatcttcgccaagaacaacggcaccaacgacaccgctaagaacagcggcactataaacctgggaaaggctgacggaagcacctctcacgagagcctgatcggcatgttcgcccaggccgagtccggtaagacagccagcgtgaagaacaccaaagacatcaacataaacaccaaaaagagcgttggcatgtacgccaaaaacgacgcctctaacatcaccgacgtggacctggaaaacaccggtgacataaacataaactcccaagagagcgcagggatctacgcccccaagtctaacatctcaaaggtgggaaccatcaccctgaaaaactccacagtgtctaacggcagcagcgctgtgtacgtgagcaacggaggaaaggtggccgacacagcatccgcgaagatcaacctcgggaaagtgaaccagaacagagtggcttactacgtgaacggtaaggactcagcgctcgccggcgccaacatcggcaagatcacagggtacggcgtgggagtatacctgcagggcgcgtctggagacaaggccaccctggactcgaacaccagcaaactggactacaccgcccagggcacaggcaacggcatcatcggcctactgctgaagggtgaaacagacatccagagctacatcaaaggcatcaaggttggtaacacggttcctagaagcaaccccagcgacaaagacaaatacgcaataggcggcggaggctctggaggagggtccggagggggctcaccagccgccgccgaagaaaaggccgcccctgccgccgctaaacctgctacaaccgagggcgagttccccgagacacgggagaagatgagcggcatccgcagagccatcgccaaggccatggtgcacagcaaacacaccgcccctcacgttacactgatggacgaggccgacgtgaccaagctggtcgcccaccggaagaagttcaaggccatcgccgccgagaaaggcatcaaactgaccttcctgccttacgtggtgaaggccctggtgtccgccctcagagaataccccgtgctgaacaccagcatcgacgacgaaaccgaggaaatcatccagaagcactactacaacatcggcatcgcggctgacaccgacagaggcctgctggtgccagtgatcaagcacgccgacagaaagcccatcttcgccctggcccaggagatcaatgagctggctgaaaaagccagagacggaaagctgacacctggcgagatgaagggcgcttcttgcaccatcacaaacatcggaagcgccggcggacagtggttcacccctgtgatcaaccaccctgaggtggccatcctgggcatcggcagaatcgccgagaagcctatcgtgcgggacggcgaaatcgtggctgctcctatgctggccctgagcctgtctttcgaccacagaatgatcgacggcgccaccgcccaaaaggcacttaaccacatcaagcggctgctgagcgaccccgagctgctgctgatggaagcctgatga

SEQ ID NO: 42 - DNA, 7320 bp, Fusobacterium nucleatum
  source 1..7320: mol_type = other DNA
atggaaacagacacattgctgctatgggtcctgctgctctgggttccaggctccactggtgacgaagtgaacactgagcaaatgaaggtggtgccaacacgcgaagagatcgtctcgagcaaagagaacctgaagaactccgtcggaggactgcagaccaaaatcaacgacgccagatccgaaaacgaaaaggcgctgaaggggctgagactggagctaatacagctgatggaacagggaaaccaagtggtcaagtccccttggtcctcttggcagttcggcatgaactacttctacgaccactggggaagcgaatacaaggggcggggggacaagccccagaagtacctgttcaacggaatctacaccagaggtaactggaaagtgcggaacgccatggacgtagccgagaaccagagagttggtggaagacccctgacgcctggcaacgactctctgaacagctggaagaacgctaacaacagcagcaactccggcgtgaagatcgacagagacaacagcatctcttctagcacaaacgggaaccggagctggggcctggtggacctggaaaacctccgagaacctaccaacgaagtcgagatcctggcgagaatcagccccaaagaggtgaccaagcaggcaataagcctaaacatcacagaacctaccgtgcagaccctggaggcccctgacgtgaacccccaggtgaacgagcctctgcctgcccctgtgatagacctgcccgaagtagaaacggtgaccatcaaccctctgactatcaacgctcctgacgctcctaccgcgccttctgcgcctacaatcaacatcggcataacagcccccagcgcgcctagcgcccctaccatcaacgtggtgcccaccagcccctccacacctagcgcccctacgatcaacatcggcatccaacctcctagcatcacccctctgagcatcaccacgcctgacagcgttgacgccccaaacgtcgtatctccgcagatcaagccggtcgacttcacagtggaccctggcggggacagcaacgcttactctagcgagaagcacaacagccaccagggctggaaggccagctggtccaagaccatcaacgtgacagagctgaccaaccggaactacgtgtccctgacaagagacaccgctgactcgaccatcccaacagaccaggtgataaacgtgaccaaagagaacaacagagccatggtggttgacgaggtgagaaagaacgggatcgtagtggacttcaagggcaccatcaacctgcagagaagccagaacgtgggcatcgacctgcaaggtacacaccagggcagcaagagcgacccactgatcgccaacatctacaactccggaaagatcatcggcaacgccaaatacggaagcacggccaacaaggagcagatcgccttcggattcaacaacgccgacggctccaacaacacgaccatgaccaacatggtgaacaaaggagagataacactgaacgcgccttcctccgccggtatccaactgaagcctgaagacccccacgactggcagcctaactcttggaacgccgcgccactgcaaatcgacaacaagacgcccaacaaaatcaagggcagagtgctgatgaaggctgacaaccagaaagacataaacctgaacggctcaggcagcttcggcatggtcaccgtgttcaacgagggcgtacccaagagactgttcgcacccagctacgtaacaaactacgagaacttgcggtccgagcggacatacgacggcgagagagtgctgccaggcggcgagatcggccggagcgctctgtctgactctaaatacacatccggcgtgtacaacaccggcaacatcaacatcaacggtgacagctctatcggcgtgggcctgctgcaggagatacaggaggtgaagctcgccgggaacatcaacataggcaccaaggctgttacacaggagactggcatcagcaacctgcccaacgccgggtcgaaaacctacagcatcaacaaggtcgaagaggccgtgggagtgttcgccggcgtccctacgatgcctgtgaagcctggcgagacagacaccctgatcaacggctctggcgcaagaaacacagccacttccttggtgggcaccgagacagtggagatcaacggaaacatcagcctcggcgagcacgcgacccagtcaatcggcgccctggtgggcgacacggaagtggacctcaacaagggtcagctgaccgagaacggcgtaaacaaaggctctaacgccgacagaaagctgaagagaagcggggacatcacagcaaagagcaacagcatcatcaacgtgggcggaaaaaagaactacggattcgtggtgtctaactcagcccacagcagcaagttcggcacaaccgtggacagcctcgagtacaaggtggacaaaacccaccacggaaaaggcatcaacgaaggcaaaatcaacgtaacgggcgacgagtccgttggtttcgccatgatcaagggaggcgacagcaagagcagcggcatcatctctgtaggcaacaacgcggagaactccatcggcttctacggcaaggaggactccttcaccaacagcgggacaatagaggtgacgagcgcaaagaagaagaacaaggccgtagtgctggacgggacaaacgcttctaacaagatcaacttcaccaacaccggtaacatatacgtcaacactagcgacaacggaaacaagaacttggacggggacggcaacatcggtatctacgcccaaggtaactacaaaatcgagcacaacagcggcatcgtcaaggccggaaaggacgccatcgccttctacgtgaaaaactcaacaggagaagtgaacatcaacgcccctatcgagctggctaacagcaacaaggcaactactatcgggatctacagcgacggcgacgccaaggtaaaattcggggccagctcctcacttaagatcggggaaaaggctgtggggctctacagcgccgaccccacaaagttcaacaacacattcgaaatcgaaaccggcaagacactgaacgtggagctaggtaagaacagcacattcggccttctgaacggcaacaaaaacgttactaactccccactgctgtcaaagtacctgaacaacaacaccacggacaagatcaacatcaccaagttcgacgaaggcgcctccctgttctacgccacactgaaggccaaggccatcctggacgaggactacaaggtgacaaacgctgacgccgctagcacctctgtcctagtggccaacgacggggccaacgtggagatcgccagcgggaagaagctggaaaccaacacaaacgtgggcctggtggccaccaagggggctggcgcctctctgagcacctcagttgcggaaaacaaggggacccttatctctactcggacagacaagggcatcggcatctacacgtacacagccaacggtgagaacagcggaaccatcatcatgaaaaaccagaactccgttgggatactgggctccggaggatccaacctgaagaacacagggaagatcgagctggaagctatcagcagcgccggcgtgtacgccgaaaacagcaacatgatcaacagcgggacagcatcagagatcgtagtgaaaaagaaggcgtccgtgggcatctacgcccgcgaaacaagcatcagctctgtgccaaagaacgtgaaaaacgaggggaaaatcgagataaaagccgacggcgacgggaaatccgccggcatctactcgaagaaggagggcggcgccaaactgaccatcgaaaacacggggaacatcgaggtcgctcaaaaagcatcggccggcatctacgcgaaaaacgaatctaaccaggccaacacagagtctgtcgtgaccaacagcggcttaatcaagatgagcgccgagaacagcatcggcatcatgggcgaaaagagcaaggtagaaaactcaggtaccggaacaaaggggatcgagatcgccggaaaaaagagcgcaggcatcctggtgacaaaggaatctgaagtggtgaactccggcaggatccttctggccaacaactcaatcctggcgagctctgacggcctcgttggcatcagcgttgacggcagcagcacgggcgagaacgacgcctcaggagagatcaagatcgacgccgcctactctacaggaatgctctcttctggaggcgacatcaccaacgcaggaaaaatcgacctggaaaaaaaggaatctataggcatctacgccacaaacgccaacgtgacaaacaacggggctaccacgaaaggcatcttcatcaaggacgaaaagagcgttggcatctacagcaagatcaacagctctagcacggccgacaagatcgtcacaaactctggtaccatcgacataggcggaacaagcaagaccgggtccgcgggcatctactctatcgtggagaacggagctactaagagactgagcacggtatcctcggggaacatcaccatctctcagaaggagtcagtgggtatctacgccaagaacaaatcaagccaggccaacatcgagtctgttgttacaaactcagggaacggcaagatcgaggtcaagaacgagggctctgccggcatcctggtggaaaagagcaaggttaccaacacagctgtaggcaccaacggcataatcgtgagcgccaagaagtctgccggaataatcgggaagctgggcagcgaaatcatcaactcaggcataatcaagactgaaacagccacaccaacggccgccgccgacggtgtcgtcggcatcagcctgaacgcgtctaaggccaccaacgacagcaacggtacaatcacgctcgacacaaactacagcacaggcatgttcggtgagaacagctctacagcgataaacgaaggaaacatcacaggtaccaacaaggaaaacatagtcggcatggcgggtaaggccacaactgtcacaaacaagaagaccatcacgttgtccgccaaaaaatctactggcatcttcggcgaggacaacagcacgctcttgaacgacaccaacggcaacatcaccgtgaaggaagagtcctccgtcggcatctactcaaagggcaacaacaagatcgctgaaaacaagggcatcatcctcgccgaaaaaaagaagtctgccggaatgttgggttcagagggcaagctggagaacagcaacagcatcaccacccaggacgaggaaagcgccggaatgtacgtcgagaacagcagcgcaacaaacaaaaaaacaatcacagctaacggcaaaaagtcagcaggcgtgtacgtgaagctggacaaggctgccggaggcaccatcgcgggtacgaacgagggaaccaacgccaccatcacgatgacgaacgagggcagcgctgccatgctgggagaagtgaagtccctcgtgaccaacaactcggccactctgacactgaccaaccaaaacagcatcgtagtgaacaccaaggaaaccgtgggcatgatgatcactaacgacaccacaggcatccctaactccaacgtcaaggccctgaacacaggcaccatcgacctgaactccggcgctaccaacaaggacaacataggaatcctggccaacaagcgggccaccggaatcaacgagaagaacatcaacgtgaactccaaatcttctgtgggaatgctggctaaagagggttccaacatcgagaacaacaccaccttcagcaccatcaacctgaaggcagaatccggcatcggaatgctggccgacggcaaagacgcctctggcaacatatccacagccctgaacaacgctcggatagttgccacttccatcggcaagagatctctgggcatgctggcgcagaacaacggaaaagtcggcaacaacaaaaacatagacatcctggccgaaaacggagtgggcatcttcgtgagcgaaaccggcgtgggagagaacaccagcactggtactatcagcctggaaaacaaggagagcgtgggtatcttcgccaagaacaacggcaccaacgacaccgctaagaacagcggcactataaacctgggaaaggctgacggaagcacctctcacgagagcctgatcggcatgttcgcccaggccgagtccggtaagacagccagcgtgaagaacaccaaagacatcaacataaacaccaaaaagagcgttggcatgtacgccaaaaacgacgcctctaacatcaccgacgtggacctggaaaacaccggtgacataaacataaactcccaagagagcgcagggatctacgcccccaagtctaacatctcaaaggtgggaaccatcaccctgaaaaactccacagtgtctaacggcagcagcgctgtgtacgtgagcaacggaggaaaggtggccgacacagcatccgcgaagatcaacctcgggaaagtgaaccagaacagagtggcttactacgtgaacggtaaggactcagcgctcgccggcgccaacatcggcaagatcacagggtacggcgtgggagtatacctgcagggcgcgtctggagacaaggccaccctggactcgaacaccagcaaactggactacaccgcccagggcacaggcaacggcatcatcggcctactgctgaagggtgaaacagacatccagagctacatcaaaggcatcaaggttggtaacacggttcctagaagcaaccccagcgacaaagacaaatacgcaataggcggcggaggctctggaggagggtccggagggggctcagaaagccaggtgcggcagcagttcagcaaagatatcattaagctgctgaacgagcaagtgaacaaggaaatgaacagcagcaacctgtacatgtctatgagctcttggtgctacacccacagcctggacggcgccggcctgttcctgttcgaccacgccgctgaagaatacgagcacgctaaaaagctgatcatcttcctgaacgaaaacaacgtgcccgtgcagctgaccagcatctccgcccctgagcacaagttcgagggcctcacccagatcttccagaaggcctacgagcacgaacaacacatcagcgagagcatcaacaacatcgtggaccacgccatcaagtccaaggaccacgccacattcaacttcctgcagtggtacgtcgccgagcagcacgaggaagaggtgctgttcaaggacatcctggacaagatcgagctgatcggaaacgagaaccacggcctgtacctggccgaccagtacgtgaagggcatcgccaaaagcagaaagagctgatga

SEQ ID NO: 43 - DNA, 6882 bp, Fusobacterium nucleatum
  source 1..6882: mol_type = other DNA
atggaaacagacacattgctgctatgggtcctgctgctctgggttccaggctccactggtgacgaagtgaacactgagcaaatgaaggtggtgccaacacgcgaagagatcgtctcgagcaaagagaacctgaagaactccgtcggaggactgcagaccaaaatcaacgacgccagatccgaaaacgaaaaggcgctgaaggggctgagactggagctaatacagctgatggaacagggaaaccaagtggtcaagtccccttggtcctcttggcagttcggcatgaactacttctacgaccactggggaagcgaatacaaggggcggggggacaagccccagaagtacctgttcaacggaatctacaccagaggtaactggaaagtgcggaacgccatggacgtagccgagaaccagagagttggtggaagacccctgacgcctggcaacgactctctgaacagctggaagaacgctaacaacagcagcaactccggcgtgaagatcgacagagacaacagcatctcttctagcacaaacgggaaccggagctggggcctggtggacctggaaaacctccgagaacctaccaacgaagtcgagatcctggcgagaatcagccccaaagaggtgaccaagcaggcaataagcctaaacatcacagaacctaccgtgcagaccctggaggcccctgacgtgaacccccaggtgaacgagcctctgcctgcccctgtgatagacctgcccgaagtagaaacggtgaccatcaaccctctgactatcaacgctcctgacgctcctaccgcgccttctgcgcctacaatcaacatcggcataacagcccccagcgcgcctagcgcccctaccatcaacgtggtgcccaccagcccctccacacctagcgcccctacgatcaacatcggcatccaacctcctagcatcacccctctgagcatcaccacgcctgacagcgttgacgccccaaacgtcgtatctccgcagatcaagccggtcgacttcacagtggaccctggcggggacagcaacgcttactctagcgagaagcacaacagccaccagggctggaaggccagctggtccaagaccatcaacgtgacagagctgaccaaccggaactacgtgtccctgacaagagacaccgctgactcgaccatcccaacagaccaggtgataaacgtgaccaaagagaacaacagagccatggtggttgacgaggtgagaaagaacgggatcgtagtggacttcaagggcaccatcaacctgcagagaagccagaacgtgggcatcgacctgcaaggtacacaccagggcagcaagagcgacccactgatcgccaacatctacaactccggaaagatcatcggcaacgccaaatacggaagcacggccaacaaggagcagatcgccttcggattcaacaacgccgacggctccaacaacacgaccatgaccaacatggtgaacaaaggagagataacactgaacgcgccttcctccgccggtatccaactgaagcctgaagacccccacgactggcagcctaactcttggaacgccgcgccactgcaaatcgacaacaagacgcccaacaaaatcaagggcagagtgctgatgaaggctgacaaccagaaagacataaacctgaacggctcaggcagcttcggcatggtcaccgtgttcaacgagggcgtacccaagagactgttcgcacccagctacgtaacaaactacgagaacttgcggtccgagcggacatacgacggcgagagagtgctgccaggcggcgagatcggccggagcgctctgtctgactctaaatacacatccggcgtgtacaacaccggcaacatcaacatcaacggtgacagctctatcggcgtgggcctgctgcaggagatacaggaggtgaagctcgccgggaacatcaacataggcaccaaggctgttacacaggagactggcatcagcaacctgcccaacgccgggtcgaaaacctacagcatcaacaaggtcgaagaggccgtgggagtgttcgccggcgtccctacgatgcctgtgaagcctggcgagacagacaccctgatcaacggctctggcgcaagaaacacagccacttccttggtgggcaccgagacagtggagatcaacggaaacatcagcctcggcgagcacgcgacccagtcaatcggcgccctggtgggcgacacggaagtggacctcaacaagggtcagctgaccgagaacggcgtaaacaaaggctctaacgccgacagaaagctgaagagaagcggggacatcacagcaaagagcaacagcatcatcaacgtgggcggaaaaaagaactacggattcgtggtgtctaactcagcccacagcagcaagttcggcacaaccgtggacagcctcgagtacaaggtggacaaaacccaccacggaaaaggcatcaacgaaggcaaaatcaacgtaacgggcgacgagtccgttggtttcgccatgatcaagggaggcgacagcaagagcagcggcatcatctctgtaggcaacaacgcggagaactccatcggcttctacggcaaggaggactccttcaccaacagcgggacaatagaggtgacgagcgcaaagaagaagaacaaggccgtagtgctggacgggacaaacgcttctaacaagatcaacttcaccaacaccggtaacatatacgtcaacactagcgacaacggaaacaagaacttggacggggacggcaacatcggtatctacgcccaaggtaactacaaaatcgagcacaacagcggcatcgtcaaggccggaaaggacgccatcgccttctacgtgaaaaactcaacaggagaagtgaacatcaacgcccctatcgagctggctaacagcaacaaggcaactactatcgggatctacagcgacggcgacgccaaggtaaaattcggggccagctcctcacttaagatcggggaaaaggctgtggggctctacagcgccgaccccacaaagttcaacaacacattcgaaatcgaaaccggcaagacactgaacgtggagctaggtaagaacagcacattcggccttctgaacggcaacaaaaacgttactaactccccactgctgtcaaagtacctgaacaacaacaccacggacaagatcaacatcaccaagttcgacgaaggcgcctccctgttctacgccacactgaaggccaaggccatcctggacgaggactacaaggtgacaaacgctgacgccgctagcacctctgtcctagtggccaacgacggggccaacgtggagatcgccagcgggaagaagctggaaaccaacacaaacgtgggcctggtggccaccaagggggctggcgcctctctgagcacctcagttgcggaaaacaaggggacccttatctctactcggacagacaagggcatcggcatctacacgtacacagccaacggtgagaacagcggaaccatcatcatgaaaaaccagaactccgttgggatactgggctccggaggatccaacctgaagaacacagggaagatcgagctggaagctatcagcagcgccggcgtgtacgccgaaaacagcaacatgatcaacagcgggacagcatcagagatcgtagtgaaaaagaaggcgtccgtgggcatctacgcccgcgaaacaagcatcagctctgtgccaaagaacgtgaaaaacgaggggaaaatcgagataaaagccgacggcgacgggaaatccgccggcatctactcgaagaaggagggcggcgccaaactgaccatcgaaaacacggggaacatcgaggtcgctcaaaaagcatcggccggcatctacgcgaaaaacgaatctaaccaggccaacacagagtctgtcgtgaccaacagcggcttaatcaagatgagcgccgagaacagcatcggcatcatgggcgaaaagagcaaggtagaaaactcaggtaccggaacaaaggggatcgagatcgccggaaaaaagagcgcaggcatcctggtgacaaaggaatctgaagtggtgaactccggcaggatccttctggccaacaactcaatcctggcgagctctgacggcctcgttggcatcagcgttgacggcagcagcacgggcgagaacgacgcctcaggagagatcaagatcgacgccgcctactctacaggaatgctctcttctggaggcgacatcaccaacgcaggaaaaatcgacctggaaaaaaaggaatctataggcatctacgccacaaacgccaacgtgacaaacaacggggctaccacgaaaggcatcttcatcaaggacgaaaagagcgttggcatctacagcaagatcaacagctctagcacggccgacaagatcgtcacaaactctggtaccatcgacataggcggaacaagcaagaccgggtccgcgggcatctactctatcgtggagaacggagctactaagagactgagcacggtatcctcggggaacatcaccatctctcagaaggagtcagtgggtatctacgccaagaacaaatcaagccaggccaacatcgagtctgttgttacaaactcagggaacggcaagatcgaggtcaagaacgagggctctgccggcatcctggtggaaaagagcaaggttaccaacacagctgtaggcaccaacggcataatcgtgagcgccaagaagtctgccggaataatcgggaagctgggcagcgaaatcatcaactcaggcataatcaagactgaaacagccacaccaacggccgccgccgacggtgtcgtcggcatcagcctgaacgcgtctaaggccaccaacgacagcaacggtacaatcacgctcgacacaaactacagcacaggcatgttcggtgagaacagctctacagcgataaacgaaggaaacatcacaggtaccaacaaggaaaacatagtcggcatggcgggtaaggccacaactgtcacaaacaagaagaccatcacgttgtccgccaaaaaatctactggcatcttcggcgaggacaacagcacgctcttgaacgacaccaacggcaacatcaccgtgaaggaagagtcctccgtcggcatctactcaaagggcaacaacaagatcgctgaaaacaagggcatcatcctcgccgaaaaaaagaagtctgccggaatgttgggttcagagggcaagctggagaacagcaacagcatcaccacccaggacgaggaaagcgccggaatgtacgtcgagaacagcagcgcaacaaacaaaaaaacaatcacagctaacggcaaaaagtcagcaggcgtgtacgtgaagctggacaaggctgccggaggcaccatcgcgggtacgaacgagggaaccaacgccaccatcacgatgacgaacgagggcagcgctgccatgctgggagaagtgaagtccctcgtgaccaacaactcggccactctgacactgaccaaccaaaacagcatcgtagtgaacaccaaggaaaccgtgggcatgatgatcactaacgacaccacaggcatccctaactccaacgtcaaggccctgaacacaggcaccatcgacctgaactccggcgctaccaacaaggacaacataggaatcctggccaacaagcgggccaccggaatcaacgagaagaacatcaacgtgaactccaaatcttctgtgggaatgctggctaaagagggttccaacatcgagaacaacaccaccttcagcaccatcaacctgaaggcagaatccggcatcggaatgctggccgacggcaaagacgcctctggcaacatatccacagccctgaacaacgctcggatagttgccacttccatcggcaagagatctctgggcatgctggcgcagaacaacggaaaagtcggcaacaacaaaaacatagacatcctggccgaaaacggagtgggcatcttcgtgagcgaaaccggcgtgggagagaacaccagcactggtactatcagcctggaaaacaaggagagcgtgggtatcttcgccaagaacaacggcaccaacgacaccgctaagaacagcggcactataaacctgggaaaggctgacggaagcacctctcacgagagcctgatcggcatgttcgcccaggccgagtccggtaagacagccagcgtgaagaacaccaaagacatcaacataaacaccaaaaagagcgttggcatgtacgccaaaaacgacgcctctaacatcaccgacgtggacctggaaaacaccggtgacataaacataaactcccaagagagcgcagggatctacgcccccaagtctaacatctcaaaggtgggaaccatcaccctgaaaaactccacagtgtctaacggcagcagcgctgtgtacgtgagcaacggaggaaaggtggccgacacagcatccgcgaagatcaacctcgggaaagtgaaccagaacagagtggcttactacgtgaacggtaaggactcagcgctcgccggcgccaacatcggcaagatcacagggtacggcgtgggagtatacctgcagggcgcgtctggagacaaggccaccctggactcgaacaccagcaaactggactacaccgcccagggcacaggcaacggcatcatcggcctactgctgaagggtgaaacagacatccagagctacatcaaaggcatcaaggttggtaacacggttcctagaagcaaccccagcgacaaagacaaatacgcaataggcggcggaggctctggaggagggtccggagggggctcaggctacatccccgaggcccctagagatggccaggcctacgtgcggaaggacggagaatgggtgctgctgagcaccttcctgtgatga

SEQ ID NO: 44 - DNA, 7416 bp, Fusobacterium nucleatum
  source 1..7416: mol_type = other DNA
atggaaacagacacattgctgctatgggtcctgctgctctgggttccaggctccactggtgacgaagtgaacactgagcaaatgaaggtggtgccaacacgcgaagagatcgtctcgagcaaagagaacctgaagaactccgtcggaggactgcagaccaaaatcaacgacgccagatccgaaaacgaaaaggcgctgaaggggctgagactggagctaatacagctgatggaacagggaaaccaagtggtcaagtccccttggtcctcttggcagttcggcatgaactacttctacgaccactggggaagcgaatacaaggggcggggggacaagccccagaagtacctgttcaacggaatctacaccagaggtaactggaaagtgcggaacgccatggacgtagccgagaaccagagagttggtggaagacccctgacgcctggcaacgactctctgaacagctggaagaacgctaacaacagcagcaactccggcgtgaagatcgacagagacaacagcatctcttctagcacaaacgggaaccggagctggggcctggtggacctggaaaacctccgagaacctaccaacgaagtcgagatcctggcgagaatcagccccaaagaggtgaccaagcaggcaataagcctaaacatcacagaacctaccgtgcagaccctggaggcccctgacgtgaacccccaggtgaacgagcctctgcctgcccctgtgatagacctgcccgaagtagaaacggtgaccatcaaccctctgactatcaacgctcctgacgctcctaccgcgccttctgcgcctacaatcaacatcggcataacagcccccagcgcgcctagcgcccctaccatcaacgtggtgcccaccagcccctccacacctagcgcccctacgatcaacatcggcatccaacctcctagcatcacccctctgagcatcaccacgcctgacagcgttgacgccccaaacgtcgtatctccgcagatcaagccggtcgacttcacagtggaccctggcggggacagcaacgcttactctagcgagaagcacaacagccaccagggctggaaggccagctggtccaagaccatcaacgtgacagagctgaccaaccggaactacgtgtccctgacaagagacaccgctgactcgaccatcccaacagaccaggtgataaacgtgaccaaagagaacaacagagccatggtggttgacgaggtgagaaagaacgggatcgtagtggacttcaagggcaccatcaacctgcagagaagccagaacgtgggcatcgacctgcaaggtacacaccagggcagcaagagcgacccactgatcgccaacatctacaactccggaaagatcatcggcaacgccaaatacggaagcacggccaacaaggagcagatcgccttcggattcaacaacgccgacggctccaacaacacgaccatgaccaacatggtgaacaaaggagagataacactgaacgcgccttcctccgccggtatccaactgaagcctgaagacccccacgactggcagcctaactcttggaacgccgcgccactgcaaatcgacaacaagacgcccaacaaaatcaagggcagagtgctgatgaaggctgacaaccagaaagacataaacctgaacggctcaggcagcttcggcatggtcaccgtgttcaacgagggcgtacccaagagactgttcgcacccagctacgtaacaaactacgagaacttgcggtccgagcggacatacgacggcgagagagtgctgccaggcggcgagatcggccggagcgctctgtctgactctaaatacacatccggcgtgtacaacaccggcaacatcaacatcaacggtgacagctctatcggcgtgggcctgctgcaggagatacaggaggtgaagctcgccgggaacatcaacataggcaccaaggctgttacacaggagactggcatcagcaacctgcccaacgccgggtcgaaaacctacagcatcaacaaggtcgaagaggccgtgggagtgttcgccggcgtccctacgatgcctgtgaagcctggcgagacagacaccctgatcaacggctctggcgcaagaaacacagccacttccttggtgggcaccgagacagtggagatcaacggaaacatcagcctcggcgagcacgcgacccagtcaatcggcgccctggtgggcgacacggaagtggacctcaacaagggtcagctgaccgagaacggcgtaaacaaaggctctaacgccgacagaaagctgaagagaagcggggacatcacagcaaagagcaacagcatcatcaacgtgggcggaaaaaagaactacggattcgtggtgtctaactcagcccacagcagcaagttcggcacaaccgtggacagcctcgagtacaaggtggacaaaacccaccacggaaaaggcatcaacgaaggcaaaatcaacgtaacgggcgacgagtccgttggtttcgccatgatcaagggaggcgacagcaagagcagcggcatcatctctgtaggcaacaacgcggagaactccatcggcttctacggcaaggaggactccttcaccaacagcgggacaatagaggtgacgagcgcaaagaagaagaacaaggccgtagtgctggacgggacaaacgcttctaacaagatcaacttcaccaacaccggtaacatatacgtcaacactagcgacaacggaaacaagaacttggacggggacggcaacatcggtatctacgcccaaggtaactacaaaatcgagcacaacagcggcatcgtcaaggccggaaaggacgccatcgccttctacgtgaaaaactcaacaggagaagtgaacatcaacgcccctatcgagctggctaacagcaacaaggcaactactatcgggatctacagcgacggcgacgccaaggtaaaattcggggccagctcctcacttaagatcggggaaaaggctgtggggctctacagcgccgaccccacaaagttcaacaacacattcgaaatcgaaaccggcaagacactgaacgtggagctaggtaagaacagcacattcggccttctgaacggcaacaaaaacgttactaactccccactgctgtcaaagtacctgaacaacaacaccacggacaagatcaacatcaccaagttcgacgaaggcgcctccctgttctacgccacactgaaggccaaggccatcctggacgaggactacaaggtgacaaacgctgacgccgctagcacctctgtcctagtggccaacgacggggccaacgtggagatcgccagcgggaagaagctggaaaccaacacaaacgtgggcctggtggccaccaagggggctggcgcctctctgagcacctcagttgcggaaaacaaggggacccttatctctactcggacagacaagggcatcggcatctacacgtacacagccaacggtgagaacagcggaaccatcatcatgaaaaaccagaactccgttgggatactgggctccggaggatccaacctgaagaacacagggaagatcgagctggaagctatcagcagcgccggcgtgtacgccgaaaacagcaacatgatcaacagcgggacagcatcagagatcgtagtgaaaaagaaggcgtccgtgggcatctacgcccgcgaaacaagcatcagctctgtgccaaagaacgtgaaaaacgaggggaaaatcgagataaaagccgacggcgacgggaaatccgccggcatctactcgaagaaggagggcggcgccaaactgaccatcgaaaacacggggaacatcgaggtcgctcaaaaagcatcggccggcatctacgcgaaaaacgaatctaaccaggccaacacagagtctgtcgtgaccaacagcggcttaatcaagatgagcgccgagaacagcatcggcatcatgggcgaaaagagcaaggtagaaaactcaggtaccggaacaaaggggatcgagatcgccggaaaaaagagcgcaggcatcctggtgacaaaggaatctgaagtggtgaactccggcaggatccttctggccaacaactcaatcctggcgagctctgacggcctcgttggcatcagcgttgacggcagcagcacgggcgagaacgacgcctcaggagagatcaagatcgacgccgcctactctacaggaatgctctcttctggaggcgacatcaccaacgcaggaaaaatcgacctggaaaaaaaggaatctataggcatctacgccacaaacgccaacgtgacaaacaacggggctaccacgaaaggcatcttcatcaaggacgaaaagagcgttggcatctacagcaagatcaacagctctagcacggccgacaagatcgtcacaaactctggtaccatcgacataggcggaacaagcaagaccgggtccgcgggcatctactctatcgtggagaacggagctactaagagactgagcacggtatcctcggggaacatcaccatctctcagaaggagtcagtgggtatctacgccaagaacaaatcaagccaggccaacatcgagtctgttgttacaaactcagggaacggcaagatcgaggtcaagaacgagggctctgccggcatcctggtggaaaagagcaaggttaccaacacagctgtaggcaccaacggcataatcgtgagcgccaagaagtctgccggaataatcgggaagctgggcagcgaaatcatcaactcaggcataatcaagactgaaacagccacaccaacggccgccgccgacggtgtcgtcggcatcagcctgaacgcgtctaaggccaccaacgacagcaacggtacaatcacgctcgacacaaactacagcacaggcatgttcggtgagaacagctctacagcgataaacgaaggaaacatcacaggtaccaacaaggaaaacatagtcggcatggcgggtaaggccacaactgtcacaaacaagaagaccatcacgttgtccgccaaaaaatctactggcatcttcggcgaggacaacagcacgctcttgaacgacaccaacggcaacatcaccgtgaaggaagagtcctccgtcggcatctactcaaagggcaacaacaagatcgctgaaaacaagggcatcatcctcgccgaaaaaaagaagtctgccggaatgttgggttcagagggcaagctggagaacagcaacagcatcaccacccaggacgaggaaagcgccggaatgtacgtcgagaacagcagcgcaacaaacaaaaaaacaatcacagctaacggcaaaaagtcagcaggcgtgtacgtgaagctggacaaggctgccggaggcaccatcgcgggtacgaacgagggaaccaacgccaccatcacgatgacgaacgagggcagcgctgccatgctgggagaagtgaagtccctcgtgaccaacaactcggccactctgacactgaccaaccaaaacagcatcgtagtgaacaccaaggaaaccgtgggcatgatgatcactaacgacaccacaggcatccctaactccaacgtcaaggccctgaacacaggcaccatcgacctgaactccggcgctaccaacaaggacaacataggaatcctggccaacaagcgggccaccggaatcaacgagaagaacatcaacgtgaactccaaatcttctgtgggaatgctggctaaagagggttccaacatcgagaacaacaccaccttcagcaccatcaacctgaaggcagaatccggcatcggaatgctggccgacggcaaagacgcctctggcaacatatccacagccctgaacaacgctcggatagttgccacttccatcggcaagagatctctgggcatgctggcgcagaacaacggaaaagtcggcaacaacaaaaacatagacatcctggccgaaaacggagtgggcatcttcgtgagcgaaaccggcgtgggagagaacaccagcactggtactatcagcctggaaaacaaggagagcgtgggtatcttcgccaagaacaacggcaccaacgacaccgctaagaacagcggcactataaacctgggaaaggctgacggaagcacctctcacgagagcctgatcggcatgttcgcccaggccgagtccggtaagacagccagcgtgaagaacaccaaagacatcaacataaacaccaaaaagagcgttggcatgtacgccaaaaacgacgcctctaacatcaccgacgtggacctggaaaacaccggtgacataaacataaactcccaagagagcgcagggatctacgcccccaagtctaacatctcaaaggtgggaaccatcaccctgaaaaactccacagtgtctaacggcagcagcgctgtgtacgtgagcaacggaggaaaggtggccgacacagcatccgcgaagatcaacctcgggaaagtgaaccagaacagagtggcttactacgtgaacggtaaggactcagcgctcgccggcgccaacatcggcaagatcacagggtacggcgtgggagtatacctgcagggcgcgtctggagacaaggccaccctggactcgaacaccagcaaactggactacaccgcccagggcacaggcaacggcatcatcggcctactgctgaagggtgaaacagacatccagagctacatcaaaggcatcaaggttggtaacacggttcctagaagcaaccccagcgacaaagacaaatacgcaataggcggcggaggctctggaggagggtccggagggggctcaatgaagatggaggagctgttcaagaagcacaagatcgtggccgtgctgagagccaacagcgtggaagaagccaagaaaaaggctctggccgtgttcctgggaggcgtgcacctgatcgagatcacattcaccgtgcccgacgccgacaccgtgatcaaggagctctctttcctgaaagagatgggcgccatcatcggcgccggcaccgtgacaagcgtggagcaggccagaaaggccgtcgagagcggcgctgaattcatcgtgtcccctcacctggacgaggaaatcagccagttcgccaaggagaagggcgtgttctacatgcctggcgtgatgacccctacagagctggtcaaggccatgaaactgggccacaccatcctgaagctgttccccggcgaggtggtgggcccccagttcgtgaaggctatgaaaggacctttccctaacgtgaagttcgtgccaaccggcggcgtgaacctggacaacgtttgcgaatggttcaaggccggagttctggccgtgggcgtcggatctgccctggtgaagggcacacctgtggaagtggccgagaaagctaaggccttcgtggaaaagatccggggctgcaccgagtgatga

SEQ ID NO: 45 - DNA, 6963 bp, Fusobacterium nucleatum
  source 1..6963: mol_type = other DNA
atggaaacagacacattgctgctatgggtcctgctgctctgggttccaggctccactggtgacgaagtgaacactgagcaaatgaaggtggtgccaacacgcgaagagatcgtctcgagcaaagagaacctgaagaactccgtcggaggactgcagaccaaaatcaacgacgccagatccgaaaacgaaaaggcgctgaaggggctgagactggagctaatacagctgatggaacagggaaaccaagtggtcaagtccccttggtcctcttggcagttcggcatgaactacttctacgaccactggggaagcgaatacaaggggcggggggacaagccccagaagtacctgttcaacggaatctacaccagaggtaactggaaagtgcggaacgccatggacgtagccgagaaccagagagttggtggaagacccctgacgcctggcaacgactctctgaacagctggaagaacgctaacaacagcagcaactccggcgtgaagatcgacagagacaacagcatctcttctagcacaaacgggaaccggagctggggcctggtggacctggaaaacctccgagaacctaccaacgaagtcgagatcctggcgagaatcagccccaaagaggtgaccaagcaggcaataagcctaaacatcacagaacctaccgtgcagaccctggaggcccctgacgtgaacccccaggtgaacgagcctctgcctgcccctgtgatagacctgcccgaagtagaaacggtgaccatcaaccctctgactatcaacgctcctgacgctcctaccgcgccttctgcgcctacaatcaacatcggcataacagcccccagcgcgcctagcgcccctaccatcaacgtggtgcccaccagcccctccacacctagcgcccctacgatcaacatcggcatccaacctcctagcatcacccctctgagcatcaccacgcctgacagcgttgacgccccaaacgtcgtatctccgcagatcaagccggtcgacttcacagtggaccctggcggggacagcaacgcttactctagcgagaagcacaacagccaccagggctggaaggccagctggtccaagaccatcaacgtgacagagctgaccaaccggaactacgtgtccctgacaagagacaccgctgactcgaccatcccaacagaccaggtgataaacgtgaccaaagagaacaacagagccatggtggttgacgaggtgagaaagaacgggatcgtagtggacttcaagggcaccatcaacctgcagagaagccagaacgtgggcatcgacctgcaaggtacacaccagggcagcaagagcgacccactgatcgccaacatctacaactccggaaagatcatcggcaacgccaaatacggaagcacggccaacaaggagcagatcgccttcggattcaacaacgccgacggctccaacaacacgaccatgaccaacatggtgaacaaaggagagataacactgaacgcgccttcctccgccggtatccaactgaagcctgaagacccccacgactggcagcctaactcttggaacgccgcgccactgcaaatcgacaacaagacgcccaacaaaatcaagggcagagtgctgatgaaggctgacaaccagaaagacataaacctgaacggctcaggcagcttcggcatggtcaccgtgttcaacgagggcgtacccaagagactgttcgcacccagctacgtaacaaactacgagaacttgcggtccgagcggacatacgacggcgagagagtgctgccaggcggcgagatcggccggagcgctctgtctgactctaaatacacatccggcgtgtacaacaccggcaacatcaacatcaacggtgacagctctatcggcgtgggcctgctgcaggagatacaggaggtgaagctcgccgggaacatcaacataggcaccaaggctgttacacaggagactggcatcagcaacctgcccaacgccgggtcgaaaacctacagcatcaacaaggtcgaagaggccgtgggagtgttcgccggcgtccctacgatgcctgtgaagcctggcgagacagacaccctgatcaacggctctggcgcaagaaacacagccacttccttggtgggcaccgagacagtggagatcaacggaaacatcagcctcggcgagcacgcgacccagtcaatcggcgccctggtgggcgacacggaagtggacctcaacaagggtcagctgaccgagaacggcgtaaacaaaggctctaacgccgacagaaagctgaagagaagcggggacatcacagcaaagagcaacagcatcatcaacgtgggcggaaaaaagaactacggattcgtggtgtctaactcagcccacagcagcaagttcggcacaaccgtggacagcctcgagtacaaggtggacaaaacccaccacggaaaaggcatcaacgaaggcaaaatcaacgtaacgggcgacgagtccgttggtttcgccatgatcaagggaggcgacagcaagagcagcggcatcatctctgtaggcaacaacgcggagaactccatcggcttctacggcaaggaggactccttcaccaacagcgggacaatagaggtgacgagcgcaaagaagaagaacaaggccgtagtgctggacgggacaaacgcttctaacaagatcaacttcaccaacaccggtaacatatacgtcaacactagcgacaacggaaacaagaacttggacggggacggcaacatcggtatctacgcccaaggtaactacaaaatcgagcacaacagcggcatcgtcaaggccggaaaggacgccatcgccttctacgtgaaaaactcaacaggagaagtgaacatcaacgcccctatcgagctggctaacagcaacaaggcaactactatcgggatctacagcgacggcgacgccaaggtaaaattcggggccagctcctcacttaagatcggggaaaaggctgtggggctctacagcgccgaccccacaaagttcaacaacacattcgaaatcgaaaccggcaagacactgaacgtggagctaggtaagaacagcacattcggccttctgaacggcaacaaaaacgttactaactccccactgctgtcaaagtacctgaacaacaacaccacggacaagatcaacatcaccaagttcgacgaaggcgcctccctgttctacgccacactgaaggccaaggccatcctggacgaggactacaaggtgacaaacgctgacgccgctagcacctctgtcctagtggccaacgacggggccaacgtggagatcgccagcgggaagaagctggaaaccaacacaaacgtgggcctggtggccaccaagggggctggcgcctctctgagcacctcagttgcggaaaacaaggggacccttatctctactcggacagacaagggcatcggcatctacacgtacacagccaacggtgagaacagcggaaccatcatcatgaaaaaccagaactccgttgggatactgggctccggaggatccaacctgaagaacacagggaagatcgagctggaagctatcagcagcgccggcgtgtacgccgaaaacagcaacatgatcaacagcgggacagcatcagagatcgtagtgaaaaagaaggcgtccgtgggcatctacgcccgcgaaacaagcatcagctctgtgccaaagaacgtgaaaaacgaggggaaaatcgagataaaagccgacggcgacgggaaatccgccggcatctactcgaagaaggagggcggcgccaaactgaccatcgaaaacacggggaacatcgaggtcgctcaaaaagcatcggccggcatctacgcgaaaaacgaatctaaccaggccaacacagagtctgtcgtgaccaacagcggcttaatcaagatgagcgccgagaacagcatcggcatcatgggcgaaaagagcaaggtagaaaactcaggtaccggaacaaaggggatcgagatcgccggaaaaaagagcgcaggcatcctggtgacaaaggaatctgaagtggtgaactccggcaggatccttctggccaacaactcaatcctggcgagctctgacggcctcgttggcatcagcgttgacggcagcagcacgggcgagaacgacgcctcaggagagatcaagatcgacgccgcctactctacaggaatgctctcttctggaggcgacatcaccaacgcaggaaaaatcgacctggaaaaaaaggaatctataggcatctacgccacaaacgccaacgtgacaaacaacggggctaccacgaaaggcatcttcatcaaggacgaaaagagcgttggcatctacagcaagatcaacagctctagcacggccgacaagatcgtcacaaactctggtaccatcgacataggcggaacaagcaagaccgggtccgcgggcatctactctatcgtggagaacggagctactaagagactgagcacggtatcctcggggaacatcaccatctctcagaaggagtcagtgggtatctacgccaagaacaaatcaagccaggccaacatcgagtctgttgttacaaactcagggaacggcaagatcgaggtcaagaacgagggctctgccggcatcctggtggaaaagagcaaggttaccaacacagctgtaggcaccaacggcataatcgtgagcgccaagaagtctgccggaataatcgggaagctgggcagcgaaatcatcaactcaggcataatcaagactgaaacagccacaccaacggccgccgccgacggtgtcgtcggcatcagcctgaacgcgtctaaggccaccaacgacagcaacggtacaatcacgctcgacacaaactacagcacaggcatgttcggtgagaacagctctacagcgataaacgaaggaaacatcacaggtaccaacaaggaaaacatagtcggcatggcgggtaaggccacaactgtcacaaacaagaagaccatcacgttgtccgccaaaaaatctactggcatcttcggcgaggacaacagcacgctcttgaacgacaccaacggcaacatcaccgtgaaggaagagtcctccgtcggcatctactcaaagggcaacaacaagatcgctgaaaacaagggcatcatcctcgccgaaaaaaagaagtctgccggaatgttgggttcagagggcaagctggagaacagcaacagcatcaccacccaggacgaggaaagcgccggaatgtacgtcgagaacagcagcgcaacaaacaaaaaaacaatcacagctaacggcaaaaagtcagcaggcgtgtacgtgaagctggacaaggctgccggaggcaccatcgcgggtacgaacgagggaaccaacgccaccatcacgatgacgaacgagggcagcgctgccatgctgggagaagtgaagtccctcgtgaccaacaactcggccactctgacactgaccaaccaaaacagcatcgtagtgaacaccaaggaaaccgtgggcatgatgatcactaacgacaccacaggcatccctaactccaacgtcaaggccctgaacacaggcaccatcgacctgaactccggcgctaccaacaaggacaacataggaatcctggccaacaagcgggccaccggaatcaacgagaagaacatcaacgtgaactccaaatcttctgtgggaatgctggctaaagagggttccaacatcgagaacaacaccaccttcagcaccatcaacctgaaggcagaatccggcatcggaatgctggccgacggcaaagacgcctctggcaacatatccacagccctgaacaacgctcggatagttgccacttccatcggcaagagatctctgggcatgctggcgcagaacaacggaaaagtcggcaacaacaaaaacatagacatcctggccgaaaacggagtgggcatcttcgtgagcgaaaccggcgtgggagagaacaccagcactggtactatcagcctggaaaacaaggagagcgtgggtatcttcgccaagaacaacggcaccaacgacaccgctaagaacagcggcactataaacctgggaaaggctgacggaagcacctctcacgagagcctgatcggcatgttcgcccaggccgagtccggtaagacagccagcgtgaagaacaccaaagacatcaacataaacaccaaaaagagcgttggcatgtacgccaaaaacgacgcctctaacatcaccgacgtggacctggaaaacaccggtgacataaacataaactcccaagagagcgcagggatctacgcccccaagtctaacatctcaaaggtgggaaccatcaccctgaaaaactccacagtgtctaacggcagcagcgctgtgtacgtgagcaacggaggaaaggtggccgacacagcatccgcgaagatcaacctcgggaaagtgaaccagaacagagtggcttactacgtgaacggtaaggactcagcgctcgccggcgccaacatcggcaagatcacagggtacggcgtgggagtatacctgcagggcgcgtctggagacaaggccaccctggactcgaacaccagcaaactggactacaccgcccagggcacaggcaacggcatcatcggcctactgctgaagggtgaaacagacatccagagctacatcaaaggcatcaaggttggtaacacggttcctagaagcaaccccagcgacaaagacaaatacgcaataggcggcggaggctctgctgtgggccaggacacgcaggaggtcatcgtggtgccacactccttgccctttaaggtggtggtcatcagcgccatcctggccctggtggtgctgaccatcatctctctgatcatcctgatcatgctgtggcagaaaaagcctagaggcggaggctctgcctggtcccacccccaattcgagaagtgatga

SEQ ID NO: 46 - protein, 3617 aa, Fusobacterium nucleatum
METDTLLLWVLLLWVPGSTGDEVNTEQMKVVPTREEIVSSKENLKNSVGGLQTKINDARSENEKALKGLRLELIQLMEQGNQVVKSPWSSWQFGMNYFYDHWGSEYKGRGDKPQKYLFNGIYTRGNWKVRNAMDVAENQRVGGRPLTPGNDSLNSWKNANNSSNSGVKIDRDNSISSSTNGNRSWGLVDLENLREPTNEVEILARISPKEVTKQAISLNITEPTVQTLEAPDVNPQVNEPLPAPVIDLPEVETVTINPLTINAPDAPTAPSAPTINIGITAPSAPSAPTINVVPTSPSTPSAPTINIGIQPPSITPLSITTPDSVDAPNVVSPQIKPVDFTVDPGGDSNAYSSEKHNSHQGWKASWSKTINVTELTNRNYVSLTRDTADSTIPTDQVINVTKENNRAMVVDEVRKNGIVVDFKGTINLQRSQNVGIDLQGTHQGSKSDPLIANIYNSGKIIGNAKYGSTANKEQIAFGFNNADGSNNTTMTNMVNKGEITLNAPSSAGIQLKPEDPHDWQPNSWNAAPLQIDNKTPNKIKGRVLMKADNQKDINLNGSGSFGMVTVFNEGVPKRLFAPSYVTNYENLRSERTYDGERVLPGGEIGRSALSDSKYTSGVYNTGNININGDSSIGVGLLQEIQEVKLAGNINIGTKAVTQETGISNLPNAGSKTYSINKVEEAVGVFAGVPTMPVKPGETDTLINGSGARNTATSLVGTETVEINGNISLGEHATQSIGALVGDTEVDLNKGQLTENGVNKGSNADRKLKRSGDITAKSNSIINVGGKKNYGFVVSNSAHSSKFGTTVDSLEYKVDKTHHGKGINEGKINVTGDESVGFAMIKGGDSKSSGIISVGNNAENSIGFYGKEDSFTNSGTIEVTSAKKKNKAVVLDGTNASNKINFTNTGNIYVNTSDNGNKNLDGDGNIGIYAQGNYKIEHNSGIVKAGKDAIAFYVKNSTGEVNINAPIELANSNKATTIGIYSDGDAKVKFGASSSLKIGEKAVGLYSADPTKFNNTFEIETGKTLNVELGKNSTFGLLNGNKNVTNSPLLSKYLNNNTTDKINITKFDEGASLFYATLKAKAILDEDYKVTNADAASTSVLVANDGANVEIASGKKLETNTNVGLVATKGAGASLSTSVAENKGTLISTRTDKGIGIYTYTANGENSGTIIMKNQNSVGILGSGGSNLKNTGKIELEAISSAGVYAENSNMINSGTASEIVVKKKASVGIYARETSISSVPKNVKNEGKIEIKADGDGKSAGIYSKKEGGAKLTIENTGNIEVAQKASAGIYAKNESNQANTESVVTNSGLIKMSAENSIGIMGEKSKVENSGTGTKGIEIAGKKSAGILVTKESEVVNSGRILLANNSILASSDGLVGISVDGSSTGENDASGEIKIDAAYSTGMLSSGGDITNAGKIDLEKKESIGIYATNANVTNNGATTKGIFIKDEKSVGIYSKINSSSTADKIVTNSGTIDIGGTSKTGSAGIYSIVENGATKRLSTVSSGNITISQKESVGIYAKNKSSQANIESVVTNSGNGKIEVKNEGSAGILVEKSKVTNTAVGTNGIIVSAKKSAGIIGKLGSEIINSGIIKTETATPTAAADGVVGISLNASKATNDSNGTITLDTNYSTGMFGENSSTAINEGNITGTNKENIVGMAGKATTVTNKKTITLSAKKSTGIFGEDNSTLLNDTNGNITVKEESSVGIYSKGNNKIAENKGIILAEKKKSAGMLGSEGKLENSNSITTQDEESAGMYVENSSATNKKTITANGKKSAGVYVKLDKAAGGTIAGTNEGTNATITMTNEGSAAMLGEVKSLVTNNSATLTLTNQNSIVVNTKETVGMMITNDTTGIPNSNVKALNTGTIDLNSGATNKDNIGILANKRATGINEKNINVNSKSSVGMLAKEGSNIENNTTFSTINLKAESGIGMLADGKDASGNISTALNNARIVATSIGKRSLGMLAQNNGKVGNNKNIDILAENGVGIFVSETGVGENTSTGTISLENKESVGIFAKNNGTNDTAKNSGTINLGKADGSTSHESLIGMFAQAESGKTASVKNTKDININTKKSVGMYAKNDASNITDVDLENTGDININSQESAGIYAPKSNISKVGTITLKNSTVSNGSSAVYVSNGGKVADTASAKINLGKVNQNRVAYYVNGKDSALAGANIGKITGYGVGVYLQGASGDKATLDSNTSKLDYTAQGTGNGIIGLLLKGETDIQSYIKGIKVGNTVPRSNPSDKDKYAIGIYADAQGTAGTPYNITTPITAGKSGVGIFADKDSNINYTGNMEIGDGTTAGTGIFITKKIGATGGRVTLGSNTIKLKGTKGVVAIASEGTEFNGGTATIELEGKDVQGVGVYGKKGSDVDVSHWNFNNHGNSAEEVRSEEGKVHINGNKNLKPRMVLTHVINGETSIVTGKTVTSVNDGTITAKENIGLMAEGIKNHGMTIWQEGNFEAVNHGTIDFSAAEKSTAMFINSARGKNDGTIKVGKNSIGIYGFYNKDTRKYEGAPASPDPNKLEIETTSNSKISLGDASTGMYLINAEKIENKGGQITSESGATKNVGIYAVNGQDSINVNNKNLTMTTAANIALGNGSVGLYSKGQSYTVRNSVTNTGNITVGDKMTGSPSVAMYAENTNLTTDSKITVGKDGIAFYGKNSDITAKGSANFSNKGVLAYLENSKFISHLGNLGATQNTMLYLKNSIAQLDGAGTKVDMDVADGYTGAYIEGNSTLTGVKTIKLGQDSTGLFLKDANFVSNAESITGTKDKARGILATNSNLTNNSKIFLSGAESIGIYSNANNTKSVVNNGELTIAGKKTLGVFLKGSQSLENKANINIADSANSLEPTIGIYTAEGSSNIRHTSGTIDVGQKSIGIYSTTNSNVEMNGGKIHVKDQGIGIYKQNGKATIKGELDIDTHIATTKDSEPTGVYAVNGTEINDQASKISIGAKSYGFILNNTDVNNTNIYNNTDAGTVTMGNDSVFLYSNGKAIINNKRDISANNSNHLIAFYIKNGGDFTNNGTIDFSTGKGNIGIYAPGGKATNKGRILVGATDDIDPMTGKVYTDVSKTVYGIGMAADNGGHIVNEGEIRIYNNKSIGMYGKGVGTTVENKGTISLDGSRATATNKIQSMTGVYVDDGATFKNYGTITTTDSYAGRDGKVNENVTGLAGVAVMNGSTLENHGKIYIDADNSYGVLIRGKRDTKGNVERYAVIKNYGEIKVRGKGTWGISWKDVSQADIDELQKQINSKISSDPERQALREAEGTDKNYQGVTITVKDGKPTFLRNGVPISDSEVEQIGKLIGKESNLGMSDIGFYVDTLGRTKPIDIDGANPPINSQLIIGTEYSEKTNKKQWFVKGDVIKPFLDQIQGRNFKLTSIAGSLTWIATPVLDNYGQITGVAMAKLPYTSFVKKTDNAWNFTDGLEQRYDMNALDSVEKRIFNKLNGIGKNEEALLTQAYDEMMGHQYANVQQRGGGSGGGSGGGSMANKPMQPITSTANKIVWSDPTRLSTTFSASLLRQRVKVGIAELNNVSGQYVSVYKRPAPKPEGCADACVIMPNENQSIRTVISGSAENLATLKAEWETHKRNVDTLFASGNAGLGFLDPTAAIVSSDTTA

SEQ ID NO: 47 - protein, 3561 aa, Fusobacterium nucleatum
METDTLLLWVLLLWVPGSTGDEVNTEQMKVVPTREEIVSSKENLKNSVGGLQTKINDARSENEKALKGLRLELIQLMEQGNQVVKSPWSSWQFGMNYFYDHWGSEYKGRGDKPQKYLFNGIYTRGNWKVRNAMDVAENQRVGGRPLTPGNDSLNSWKNANNSSNSGVKIDRDNSISSSTNGNRSWGLVDLENLREPTNEVEILARISPKEVTKQAISLNITEPTVQTLEAPDVNPQVNEPLPAPVIDLPEVETVTINPLTINAPDAPTAPSAPTINIGITAPSAPSAPTINVVPTSPSTPSAPTINIGIQPPSITPLSITTPDSVDAPNVVSPQIKPVDFTVDPGGDSNAYSSEKHNSHQGWKASWSKTINVTELTNRNYVSLTRDTADSTIPTDQVINVTKENNRAMVVDEVRKNGIVVDFKGTINLQRSQNVGIDLQGTHQGSKSDPLIANIYNSGKIIGNAKYGSTANKEQIAFGFNNADGSNNTTMTNMVNKGEITLNAPSSAGIQLKPEDPHDWQPNSWNAAPLQIDNKTPNKIKGRVLMKADNQKDINLNGSGSFGMVTVFNEGVPKRLFAPSYVTNYENLRSERTYDGERVLPGGEIGRSALSDSKYTSGVYNTGNININGDSSIGVGLLQEIQEVKLAGNINIGTKAVTQETGISNLPNAGSKTYSINKVEEAVGVFAGVPTMPVKPGETDTLINGSGARNTATSLVGTETVEINGNISLGEHATQSIGALVGDTEVDLNKGQLTENGVNKGSNADRKLKRSGDITAKSNSIINVGGKKNYGFVVSNSAHSSKFGTTVDSLEYKVDKTHHGKGINEGKINVTGDESVGFAMIKGGDSKSSGIISVGNNAENSIGFYGKEDSFTNSGTIEVTSAKKKNKAVVLDGTNASNKINFTNTGNIYVNTSDNGNKNLDGDGNIGIYAQGNYKIEHNSGIVKAGKDAIAFYVKNSTGEVNINAPIELANSNKATTIGIYSDGDAKVKFGASSSLKIGEKAVGLYSADPTKFNNTFEIETGKTLNVELGKNSTFGLLNGNKNVTNSPLLSKYLNNNTTDKINITKFDEGASLFYATLKAKAILDEDYKVTNADAASTSVLVANDGANVEIASGKKLETNTNVGLVATKGAGASLSTSVAENKGTLISTRTDKGIGIYTYTANGENSGTIIMKNQNSVGILGSGGSNLKNTGKIELEAISSAGVYAENSNMINSGTASEIVVKKKASVGIYARETSISSVPKNVKNEGKIEIKADGDGKSAGIYSKKEGGAKLTIENTGNIEVAQKASAGIYAKNESNQANTESVVTNSGLIKMSAENSIGIMGEKSKVENSGTGTKGIEIAGKKSAGILVTKESEVVNSGRILLANNSILASSDGLVGISVDGSSTGENDASGEIKIDAAYSTGMLSSGGDITNAGKIDLEKKESIGIYATNANVTNNGATTKGIFIKDEKSVGIYSKINSSSTADKIVTNSGTIDIGGTSKTGSAGIYSIVENGATKRLSTVSSGNITISQKESVGIYAKNKSSQANIESVVTNSGNGKIEVKNEGSAGILVEKSKVTNTAVGTNGIIVSAKKSAGIIGKLGSEIINSGIIKTETATPTAAADGVVGISLNASKATNDSNGTITLDTNYSTGMFGENSSTAINEGNITGTNKENIVGMAGKATTVTNKKTITLSAKKSTGIFGEDNSTLLNDTNGNITVKEESSVGIYSKGNNKIAENKGIILAEKKKSAGMLGSEGKLENSNSITTQDEESAGMYVENSSATNKKTITANGKKSAGVYVKLDKAAGGTIAGTNEGTNATITMTNEGSAAMLGEVKSLVTNNSATLTLTNQNSIVVNTKETVGMMITNDTTGIPNSNVKALNTGTIDLNSGATNKDNIGILANKRATGINEKNINVNSKSSVGMLAKEGSNIENNTTFSTINLKAESGIGMLADGKDASGNISTALNNARIVATSIGKRSLGMLAQNNGKVGNNKNIDILAENGVGIFVSETGVGENTSTGTISLENKESVGIFAKNNGTNDTAKNSGTINLGKADGSTSHESLIGMFAQAESGKTASVKNTKDININTKKSVGMYAKNDASNITDVDLENTGDININSQESAGIYAPKSNISKVGTITLKNSTVSNGSSAVYVSNGGKVADTASAKINLGKVNQNRVAYYVNGKDSALAGANIGKITGYGVGVYLQGASGDKATLDSNTSKLDYTAQGTGNGIIGLLLKGETDIQSYIKGIKVGNTVPRSNPSDKDKYAIGIYADAQGTAGTPYNITTPITAGKSGVGIFADKDSNINYTGNMEIGDGTTAGTGIFITKKIGATGGRVTLGSNTIKLKGTKGVVAIASEGTEFNGGTATIELEGKDVQGVGVYGKKGSDVDVSHWNFNNHGNSAEEVRSEEGKVHINGNKNLKPRMVLTHVINGETSIVTGKTVTSVNDGTITAKENIGLMAEGIKNHGMTIWQEGNFEAVNHGTIDFSAAEKSTAMFINSARGKNDGTIKVGKNSIGIYGFYNKDTRKYEGAPASPDPNKLEIETTSNSKISLGDASTGMYLINAEKIENKGGQITSESGATKNVGIYAVNGQDSINVNNKNLTMTTAANIALGNGSVGLYSKGQSYTVRNSVTNTGNITVGDKMTGSPSVAMYAENTNLTTDSKITVGKDGIAFYGKNSDITAKGSANFSNKGVLAYLENSKFISHLGNLGATQNTMLYLKNSIAQLDGAGTKVDMDVADGYTGAYIEGNSTLTGVKTIKLGQDSTGLFLKDANFVSNAESITGTKDKARGILATNSNLTNNSKIFLSGAESIGIYSNANNTKSVVNNGELTIAGKKTLGVFLKGSQSLENKANINIADSANSLEPTIGIYTAEGSSNIRHTSGTIDVGQKSIGIYSTTNSNVEMNGGKIHVKDQGIGIYKQNGKATIKGELDIDTHIATTKDSEPTGVYAVNGTEINDQASKISIGAKSYGFILNNTDVNNTNIYNNTDAGTVTMGNDSVFLYSNGKAIINNKRDISANNSNHLIAFYIKNGGDFTNNGTIDFSTGKGNIGIYAPGGKATNKGRILVGATDDIDPMTGKVYTDVSKTVYGIGMAADNGGHIVNEGEIRIYNNKSIGMYGKGVGTTVENKGTISLDGSRATATNKIQSMTGVYVDDGATFKNYGTITTTDSYAGRDGKVNENVTGLAGVAVMNGSTLENHGKIYIDADNSYGVLIRGKRDTKGNVERYAVIKNYGEIKVRGKGTWGISWKDVSQADIDELQKQINSKISSDPERQALREAEGTDKNYQGVTITVKDGKPTFLRNGVPISDSEVEQIGKLIGKESNLGMSDIGFYVDTLGRTKPIDIDGANPPINSQLIIGTEYSEKTNKKQWFVKGDVIKPFLDQIQGRNFKLTSIAGSLTWIATPVLDNYGQITGVAMAKLPYTSFVKKTDNAWNFTDGLEQRYDMNALDSVEKRIFNKLNGIGKNEEALLTQAYDEMMGHQYANVQQRGGGSPPEDPPDSKNTLVLFGAGFGAVITVVVIVVIIKCFCKHRSCFRRNEASRETNNSLTFGPEEALAEQTVFLGGGSAWSHPQFEK

SEQ ID NO: 48 - protein, 3740 aa, Fusobacterium nucleatum
METDTLLLWVLLLWVPGSTGDEVNTEQMKVVPTREEIVSSKENLKNSVGGLQTKINDARSENEKALKGLRLELIQLMEQGNQVVKSPWSSWQFGMNYFYDHWGSEYKGRGDKPQKYLFNGIYTRGNWKVRNAMDVAENQRVGGRPLTPGNDSLNSWKNANNSSNSGVKIDRDNSISSSTNGNRSWGLVDLENLREPTNEVEILARISPKEVTKQAISLNITEPTVQTLEAPDVNPQVNEPLPAPVIDLPEVETVTINPLTINAPDAPTAPSAPTINIGITAPSAPSAPTINVVPTSPSTPSAPTINIGIQPPSITPLSITTPDSVDAPNVVSPQIKPVDFTVDPGGDSNAYSSEKHNSHQGWKASWSKTINVTELTNRNYVSLTRDTADSTIPTDQVINVTKENNRAMVVDEVRKNGIVVDFKGTINLQRSQNVGIDLQGTHQGSKSDPLIANIYNSGKIIGNAKYGSTANKEQIAFGFNNADGSNNTTMTNMVNKGEITLNAPSSAGIQLKPEDPHDWQPNSWNAAPLQIDNKTPNKIKGRVLMKADNQKDINLNGSGSFGMVTVFNEGVPKRLFAPSYVTNYENLRSERTYDGERVLPGGEIGRSALSDSKYTSGVYNTGNININGDSSIGVGLLQEIQEVKLAGNINIGTKAVTQETGISNLPNAGSKTYSINKVEEAVGVFAGVPTMPVKPGETDTLINGSGARNTATSLVGTETVEINGNISLGEHATQSIGALVGDTEVDLNKGQLTENGVNKGSNADRKLKRSGDITAKSNSIINVGGKKNYGFVVSNSAHSSKFGTTVDSLEYKVDKTHHGKGINEGKINVTGDESVGFAMIKGGDSKSSGIISVGNNAENSIGFYGKEDSFTNSGTIEVTSAKKKNKAVVLDGTNASNKINFTNTGNIYVNTSDNGNKNLDGDGNIGIYAQGNYKIEHNSGIVKAGKDAIAFYVKNSTGEVNINAPIELANSNKATTIGIYSDGDAKVKFGASSSLKIGEKAVGLYSADPTKFNNTFEIETGKTLNVELGKNSTFGLLNGNKNVTNSPLLSKYLNNNTTDKINITKFDEGASLFYATLKAKAILDEDYKVTNADAASTSVLVANDGANVEIASGKKLETNTNVGLVATKGAGASLSTSVAENKGTLISTRTDKGIGIYTYTANGENSGTIIMKNQNSVGILGSGGSNLKNTGKIELEAISSAGVYAENSNMINSGTASEIVVKKKASVGIYARETSISSVPKNVKNEGKIEIKADGDGKSAGIYSKKEGGAKLTIENTGNIEVAQKASAGIYAKNESNQANTESVVTNSGLIKMSAENSIGIMGEKSKVENSGTGTKGIEIAGKKSAGILVTKESEVVNSGRILLANNSILASSDGLVGISVDGSSTGENDASGEIKIDAAYSTGMLSSGGDITNAGKIDLEKKESIGIYATNANVTNNGATTKGIFIKDEKSVGIYSKINSSSTADKIVTNSGTIDIGGTSKTGSAGIYSIVENGATKRLSTVSSGNITISQKESVGIYAKNKSSQANIESVVTNSGNGKIEVKNEGSAGILVEKSKVTNTAVGTNGIIVSAKKSAGIIGKLGSEIINSGIIKTETATPTAAADGVVGISLNASKATNDSNGTITLDTNYSTGMFGENSSTAINEGNITGTNKENIVGMAGKATTVTNKKTITLSAKKSTGIFGEDNSTLLNDTNGNITVKEESSVGIYSKGNNKIAENKGIILAEKKKSAGMLGSEGKLENSNSITTQDEESAGMYVENSSATNKKTITANGKKSAGVYVKLDKAAGGTIAGTNEGTNATITMTNEGSAAMLGEVKSLVTNNSATLTLTNQNSIVVNTKETVGMMITNDTTGIPNSNVKALNTGTIDLNSGATNKDNIGILANKRATGINEKNINVNSKSSVGMLAKEGSNIENNTTFSTINLKAESGIGMLADGKDASGNISTALNNARIVATSIGKRSLGMLAQNNGKVGNNKNIDILAENGVGIFVSETGVGENTSTGTISLENKESVGIFAKNNGTNDTAKNSGTINLGKADGSTSHESLIGMFAQAESGKTASVKNTKDININTKKSVGMYAKNDASNITDVDLENTGDININSQESAGIYAPKSNISKVGTITLKNSTVSNGSSAVYVSNGGKVADTASAKINLGKVNQNRVAYYVNGKDSALAGANIGKITGYGVGVYLQGASGDKATLDSNTSKLDYTAQGTGNGIIGLLLKGETDIQSYIKGIKVGNTVPRSNPSDKDKYAIGIYADAQGTAGTPYNITTPITAGKSGVGIFADKDSNINYTGNMEIGDGTTAGTGIFITKKIGATGGRVTLGSNTIKLKGTKGVVAIASEGTEFNGGTATIELEGKDVQGVGVYGKKGSDVDVSHWNFNNHGNSAEEVRSEEGKVHINGNKNLKPRMVLTHVINGETSIVTGKTVTSVNDGTITAKENIGLMAEGIKNHGMTIWQEGNFEAVNHGTIDFSAAEKSTAMFINSARGKNDGTIKVGKNSIGIYGFYNKDTRKYEGAPASPDPNKLEIETTSNSKISLGDASTGMYLINAEKIENKGGQITSESGATKNVGIYAVNGQDSINVNNKNLTMTTAANIALGNGSVGLYSKGQSYTVRNSVTNTGNITVGDKMTGSPSVAMYAENTNLTTDSKITVGKDGIAFYGKNSDITAKGSANFSNKGVLAYLENSKFISHLGNLGATQNTMLYLKNSIAQLDGAGTKVDMDVADGYTGAYIEGNSTLTGVKTIKLGQDSTGLFLKDANFVSNAESITGTKDKARGILATNSNLTNNSKIFLSGAESIGIYSNANNTKSVVNNGELTIAGKKTLGVFLKGSQSLENKANINIADSANSLEPTIGIYTAEGSSNIRHTSGTIDVGQKSIGIYSTTNSNVEMNGGKIHVKDQGIGIYKQNGKATIKGELDIDTHIATTKDSEPTGVYAVNGTEINDQASKISIGAKSYGFILNNTDVNNTNIYNNTDAGTVTMGNDSVFLYSNGKAIINNKRDISANNSNHLIAFYIKNGGDFTNNGTIDFSTGKGNIGIYAPGGKATNKGRILVGATDDIDPMTGKVYTDVSKTVYGIGMAADNGGHIVNEGEIRIYNNKSIGMYGKGVGTTVENKGTISLDGSRATATNKIQSMTGVYVDDGATFKNYGTITTTDSYAGRDGKVNENVTGLAGVAVMNGSTLENHGKIYIDADNSYGVLIRGKRDTKGNVERYAVIKNYGEIKVRGKGTWGISWKDVSQADIDELQKQINSKISSDPERQALREAEGTDKNYQGVTITVKDGKPTFLRNGVPISDSEVEQIGKLIGKESNLGMSDIGFYVDTLGRTKPIDIDGANPPINSQLIIGTEYSEKTNKKQWFVKGDVIKPFLDQIQGRNFKLTSIAGSLTWIATPVLDNYGQITGVAMAKLPYTSFVKKTDNAWNFTDGLEQRYDMNALDSVEKRIFNKLNGIGKNEEALLTQAYDEMMGHQYANVQQRGGGSGGGSGGGSPAAAEEKAAPAAAKPATTEGEFPETREKMSGIRRAIAKAMVHSKHTAPHVTLMDEADVTKLVAHRKKFKAIAAEKGIKLTFLPYVVKALVSALREYPVLNTSIDDETEEIIQKHYYNIGIAADTDRGLLVPVIKHADRKPIFALAQEINELAEKARDGKLTPGEMKGASCTITNIGSAGGQWFTPVINHPEVAILGIGRIAEKPIVRDGEIVAAPMLALSLSFDHRMIDGATAQKALNHIKRLLSDPELLLMEA

SEQ ID NO: 49 - protein, 3659 aa, Fusobacterium nucleatum
METDTLLLWVLLLWVPGSTGDEVNTEQMKVVPTREEIVSSKENLKNSVGGLQTKINDARSENEKALKGLRLELIQLMEQGNQVVKSPWSSWQFGMNYFYDHWGSEYKGRGDKPQKYLFNGIYTRGNWKVRNAMDVAENQRVGGRPLTPGNDSLNSWKNANNSSNSGVKIDRDNSISSSTNGNRSWGLVDLENLREPTNEVEILARISPKEVTKQAISLNITEPTVQTLEAPDVNPQVNEPLPAPVIDLPEVETVTINPLTINAPDAPTAPSAPTINIGITAPSAPSAPTINVVPTSPSTPSAPTINIGIQPPSITPLSITTPDSVDAPNVVSPQIKPVDFTVDPGGDSNAYSSEKHNSHQGWKASWSKTINVTELTNRNYVSLTRDTADSTIPTDQVINVTKENNRAMVVDEVRKNGIVVDFKGTINLQRSQNVGIDLQGTHQGSKSDPLIANIYNSGKIIGNAKYGSTANKEQIAFGFNNADGSNNTTMTNMVNKGEITLNAPSSAGIQLKPEDPHDWQPNSWNAAPLQIDNKTPNKIKGRVLMKADNQKDINLNGSGSFGMVTVFNEGVPKRLFAPSYVTNYENLRSERTYDGERVLPGGEIGRSALSDSKYTSGVYNTGNININGDSSIGVGLLQEIQEVKLAGNINIGTKAVTQETGISNLPNAGSKTYSINKVEEAVGVFAGVPTMPVKPGETDTLINGSGARNTATSLVGTETVEINGNISLGEHATQSIGALVGDTEVDLNKGQLTENGVNKGSNADRKLKRSGDITAKSNSIINVGGKKNYGFVVSNSAHSSKFGTTVDSLEYKVDKTHHGKGINEGKINVTGDESVGFAMIKGGDSKSSGIISVGNNAENSIGFYGKEDSFTNSGTIEVTSAKKKNKAVVLDGTNASNKINFTNTGNIYVNTSDNGNKNLDGDGNIGIYAQGNYKIEHNSGIVKAGKDAIAFYVKNSTGEVNINAPIELANSNKATTIGIYSDGDAKVKFGASSSLKIGEKAVGLYSADPTKFNNTFEIETGKTLNVELGKNSTFGLLNGNKNVTNSPLLSKYLNNNTTDKINITKFDEGASLFYATLKAKAILDEDYKVTNADAASTSVLVANDGANVEIASGKKLETNTNVGLVATKGAGASLSTSVAENKGTLISTRTDKGIGIYTYTANGENSGTIIMKNQNSVGILGSGGSNLKNTGKIELEAISSAGVYAENSNMINSGTASEIVVKKKASVGIYARETSISSVPKNVKNEGKIEIKADGDGKSAGIYSKKEGGAKLTIENTGNIEVAQKASAGIYAKNESNQANTESVVTNSGLIKMSAENSIGIMGEKSKVENSGTGTKGIEIAGKKSAGILVTKESEVVNSGRILLANNSILASSDGLVGISVDGSSTGENDASGEIKIDAAYSTGMLSSGGDITNAGKIDLEKKESIGIYATNANVTNNGATTKGIFIKDEKSVGIYSKINSSSTADKIVTNSGTIDIGGTSKTGSAGIYSIVENGATKRLSTVSSGNITISQKESVGIYAKNKSSQANIESVVTNSGNGKIEVKNEGSAGILVEKSKVTNTAVGTNGIIVSAKKSAGIIGKLGSEIINSGIIKTETATPTAAADGVVGISLNASKATNDSNGTITLDTNYSTGMFGENSSTAINEGNITGTNKENIVGMAGKATTVTNKKTITLSAKKSTGIFGEDNSTLLNDTNGNITVKEESSVGIYSKGNNKIAENKGIILAEKKKSAGMLGSEGKLENSNSITTQDEESAGMYVENSSATNKKTITANGKKSAGVYVKLDKAAGGTIAGTNEGTNATITMTNEGSAAMLGEVKSLVTNNSATLTLTNQNSIVVNTKETVGMMITNDTTGIPNSNVKALNTGTIDLNSGATNKDNIGILANKRATGINEKNINVNSKSSVGMLAKEGSNIENNTTFSTINLKAESGIGMLADGKDASGNISTALNNARIVATSIGKRSLGMLAQNNGKVGNNKNIDILAENGVGIFVSETGVGENTSTGTISLENKESVGIFAKNNGTNDTAKNSGTINLGKADGSTSHESLIGMFAQAESGKTASVKNTKDININTKKSVGMYAKNDASNITDVDLENTGDININSQESAGIYAPKSNISKVGTITLKNSTVSNGSSAVYVSNGGKVADTASAKINLGKVNQNRVAYYVNGKDSALAGANIGKITGYGVGVYLQGASGDKATLDSNTSKLDYTAQGTGNGIIGLLLKGETDIQSYIKGIKVGNTVPRSNPSDKDKYAIGIYADAQGTAGTPYNITTPITAGKSGVGIFADKDSNINYTGNMEIGDGTTAGTGIFITKKIGATGGRVTLGSNTIKLKGTKGVVAIASEGTEFNGGTATIELEGKDVQGVGVYGKKGSDVDVSHWNFNNHGNSAEEVRSEEGKVHINGNKNLKPRMVLTHVINGETSIVTGKTVTSVNDGTITAKENIGLMAEGIKNHGMTIWQEGNFEAVNHGTIDFSAAEKSTAMFINSARGKNDGTIKVGKNSIGIYGFYNKDTRKYEGAPASPDPNKLEIETTSNSKISLGDASTGMYLINAEKIENKGGQITSESGATKNVGIYAVNGQDSINVNNKNLTMTTAANIALGNGSVGLYSKGQSYTVRNSVTNTGNITVGDKMTGSPSVAMYAENTNLTTDSKITVGKDGIAFYGKNSDITAKGSANFSNKGVLAYLENSKFISHLGNLGATQNTMLYLKNSIAQLDGAGTKVDMDVADGYTGAYIEGNSTLTGVKTIKLGQDSTGLFLKDANFVSNAESITGTKDKARGILATNSNLTNNSKIFLSGAESIGIYSNANNTKSVVNNGELTIAGKKTLGVFLKGSQSLENKANINIADSANSLEPTIGIYTAEGSSNIRHTSGTIDVGQKSIGIYSTTNSNVEMNGGKIHVKDQGIGIYKQNGKATIKGELDIDTHIATTKDSEPTGVYAVNGTEINDQASKISIGAKSYGFILNNTDVNNTNIYNNTDAGTVTMGNDSVFLYSNGKAIINNKRDISANNSNHLIAFYIKNGGDFTNNGTIDFSTGKGNIGIYAPGGKATNKGRILVGATDDIDPMTGKVYTDVSKTVYGIGMAADNGGHIVNEGEIRIYNNKSIGMYGKGVGTTVENKGTISLDGSRATATNKIQSMTGVYVDDGATFKNYGTITTTDSYAGRDGKVNENVTGLAGVAVMNGSTLENHGKIYIDADNSYGVLIRGKRDTKGNVERYAVIKNYGEIKVRGKGTWGISWKDVSQADIDELQKQINSKISSDPERQALREAEGTDKNYQGVTITVKDGKPTFLRNGVPISDSEVEQIGKLIGKESNLGMSDIGFYVDTLGRTKPIDIDGANPPINSQLIIGTEYSEKTNKKQWFVKGDVIKPFLDQIQGRNFKLTSIAGSLTWIATPVLDNYGQITGVAMAKLPYTSFVKKTDNAWNFTDGLEQRYDMNALDSVEKRIFNKLNGIGKNEEALLTQAYDEMMGHQYANVQQRGGGSGGGSGGGSESQVRQQFSKDIIKLLNEQVNKEMNSSNLYMSMSSWCYTHSLDGAGLFLFDHAAEEYEHAKKLIIFLNENNVPVQLTSISAPEHKFEGLTQIFQKAYEHEQHISESINNIVDHAIKSKDHATFNFLQWYVAEQHEEEVLFKDILDKIELIGNENHGLYLADQYVKGIAKSRKS

SEQ ID NO: 50 - protein, 3513 aa, Fusobacterium nucleatum
METDTLLLWVLLLWVPGSTGDEVNTEQMKVVPTREEIVSSKENLKNSVGGLQTKINDARSENEKALKGLRLELIQLMEQGNQVVKSPWSSWQFGMNYFYDHWGSEYKGRGDKPQKYLFNGIYTRGNWKVRNAMDVAENQRVGGRPLTPGNDSLNSWKNANNSSNSGVKIDRDNSISSSTNGNRSWGLVDLENLREPTNEVEILARISPKEVTKQAISLNITEPTVQTLEAPDVNPQVNEPLPAPVIDLPEVETVTINPLTINAPDAPTAPSAPTINIGITAPSAPSAPTINVVPTSPSTPSAPTINIGIQPPSITPLSITTPDSVDAPNVVSPQIKPVDFTVDPGGDSNAYSSEKHNSHQGWKASWSKTINVTELTNRNYVSLTRDTADSTIPTDQVINVTKENNRAMVVDEVRKNGIVVDFKGTINLQRSQNVGIDLQGTHQGSKSDPLIANIYNSGKIIGNAKYGSTANKEQIAFGFNNADGSNNTTMTNMVNKGEITLNAPSSAGIQLKPEDPHDWQPNSWNAAPLQIDNKTPNKIKGRVLMKADNQKDINLNGSGSFGMVTVFNEGVPKRLFAPSYVTNYENLRSERTYDGERVLPGGEIGRSALSDSKYTSGVYNTGNININGDSSIGVGLLQEIQEVKLAGNINIGTKAVTQETGISNLPNAGSKTYSINKVEEAVGVFAGVPTMPVKPGETDTLINGSGARNTATSLVGTETVEINGNISLGEHATQSIGALVGDTEVDLNKGQLTENGVNKGSNADRKLKRSGDITAKSNSIINVGGKKNYGFVVSNSAHSSKFGTTVDSLEYKVDKTHHGKGINEGKINVTGDESVGFAMIKGGDSKSSGIISVGNNAENSIGFYGKEDSFTNSGTIEVTSAKKKNKAVVLDGTNASNKINFTNTGNIYVNTSDNGNKNLDGDGNIGIYAQGNYKIEHNSGIVKAGKDAIAFYVKNSTGEVNINAPIELANSNKATTIGIYSDGDAKVKFGASSSLKIGEKAVGLYSADPTKFNNTFEIETGKTLNVELGKNSTFGLLNGNKNVTNSPLLSKYLNNNTTDKINITKFDEGASLFYATLKAKAILDEDYKVTNADAASTSVLVANDGANVEIASGKKLETNTNVGLVATKGAGASLSTSVAENKGTLISTRTDKGIGIYTYTANGENSGTIIMKNQNSVGILGSGGSNLKNTGKIELEAISSAGVYAENSNMINSGTASEIVVKKKASVGIYARETSISSVPKNVKNEGKIEIKADGDGKSAGIYSKKEGGAKLTIENTGNIEVAQKASAGIYAKNESNQANTESVVTNSGLIKMSAENSIGIMGEKSKVENSGTGTKGIEIAGKKSAGILVTKESEVVNSGRILLANNSILASSDGLVGISVDGSSTGENDASGEIKIDAAYSTGMLSSGGDITNAGKIDLEKKESIGIYATNANVTNNGATTKGIFIKDEKSVGIYSKINSSSTADKIVTNSGTIDIGGTSKTGSAGIYSIVENGATKRLSTVSSGNITISQKESVGIYAKNKSSQANIESVVTNSGNGKIEVKNEGSAGILVEKSKVTNTAVGTNGIIVSAKKSAGIIGKLGSEIINSGIIKTETATPTAAADGVVGISLNASKATNDSNGTITLDTNYSTGMFGENSSTAINEGNITGTNKENIVGMAGKATTVTNKKTITLSAKKSTGIFGEDNSTLLNDTNGNITVKEESSVGIYSKGNNKIAENKGIILAEKKKSAGMLGSEGKLENSNSITTQDEESAGMYVENSSATNKKTITANGKKSAGVYVKLDKAAGGTIAGTNEGTNATITMTNEGSAAMLGEVKSLVTNNSATLTLTNQNSIVVNTKETVGMMITNDTTGIPNSNVKALNTGTIDLNSGATNKDNIGILANKRATGINEKNINVNSKSSVGMLAKEGSNIENNTTFSTINLKAESGIGMLADGKDASGNISTALNNARIVATSIGKRSLGMLAQNNGKVGNNKNIDILAENGVGIFVSETGVGENTSTGTISLENKESVGIFAKNNGTNDTAKNSGTINLGKADGSTSHESLIGMFAQAESGKTASVKNTKDININTKKSVGMYAKNDASNITDVDLENTGDININSQESAGIYAPKSNISKVGTITLKNSTVSNGSSAVYVSNGGKVADTASAKINLGKVNQNRVAYYVNGKDSALAGANIGKITGYGVGVYLQGASGDKATLDSNTSKLDYTAQGTGNGIIGLLLKGETDIQSYIKGIKVGNTVPRSNPSDKDKYAIGIYADAQGTAGTPYNITTPITAGKSGVGIFADKDSNINYTGNMEIGDGTTAGTGIFITKKIGATGGRVTLGSNTIKLKGTKGVVAIASEGTEFNGGTATIELEGKDVQGVGVYGKKGSDVDVSHWNFNNHGNSAEEVRSEEGKVHINGNKNLKPRMVLTHVINGETSIVTGKTVTSVNDGTITAKENIGLMAEGIKNHGMTIWQEGNFEAVNHGTIDFSAAEKSTAMFINSARGKNDGTIKVGKNSIGIYGFYNKDTRKYEGAPASPDPNKLEIETTSNSKISLGDASTGMYLINAEKIENKGGQITSESGATKNVGIYAVNGQDSINVNNKNLTMTTAANIALGNGSVGLYSKGQSYTVRNSVTNTGNITVGDKMTGSPSVAMYAENTNLTTDSKITVGKDGIAFYGKNSDITAKGSANFSNKGVLAYLENSKFISHLGNLGATQNTMLYLKNSIAQLDGAGTKVDMDVADGYTGAYIEGNSTLTGVKTIKLGQDSTGLFLKDANFVSNAESITGTKDKARGILATNSNLTNNSKIFLSGAESIGIYSNANNTKSVVNNGELTIAGKKTLGVFLKGSQSLENKANINIADSANSLEPTIGIYTAEGSSNIRHTSGTIDVGQKSIGIYSTTNSNVEMNGGKIHVKDQGIGIYKQNGKATIKGELDIDTHIATTKDSEPTGVYAVNGTEINDQASKISIGAKSYGFILNNTDVNNTNIYNNTDAGTVTMGNDSVFLYSNGKAIINNKRDISANNSNHLIAFYIKNGGDFTNNGTIDFSTGKGNIGIYAPGGKATNKGRILVGATDDIDPMTGKVYTDVSKTVYGIGMAADNGGHIVNEGEIRIYNNKSIGMYGKGVGTTVENKGTISLDGSRATATNKIQSMTGVYVDDGATFKNYGTITTTDSYAGRDGKVNENVTGLAGVAVMNGSTLENHGKIYIDADNSYGVLIRGKRDTKGNVERYAVIKNYGEIKVRGKGTWGISWKDVSQADIDELQKQINSKISSDPERQALREAEGTDKNYQGVTITVKDGKPTFLRNGVPISDSEVEQIGKLIGKESNLGMSDIGFYVDTLGRTKPIDIDGANPPINSQLIIGTEYSEKTNKKQWFVKGDVIKPFLDQIQGRNFKLTSIAGSLTWIATPVLDNYGQITGVAMAKLPYTSFVKKTDNAWNFTDGLEQRYDMNALDSVEKRIFNKLNGIGKNEEALLTQAYDEMMGHQYANVQQRGGGSGGGSGGGSGYIPEAPRDGQAYVRKDGEWVLLSTFL

SEQ ID NO: 51 - protein, 3691 aa, Fusobacterium nucleatum
METDTLLLWVLLLWVPGSTGDEVNTEQMKVVPTREEIVSSKENLKNSVGGLQTKINDARSENEKALKGLRLELIQLMEQGNQVVKSPWSSWQFGMNYFYDHWGSEYKGRGDKPQKYLFNGIYTRGNWKVRNAMDVAENQRVGGRPLTPGNDSLNSWKNANNSSNSGVKIDRDNSISSSTNGNRSWGLVDLENLREPTNEVEILARISPKEVTKQAISLNITEPTVQTLEAPDVNPQVNEPLPAPVIDLPEVETVTINPLTINAPDAPTAPSAPTINIGITAPSAPSAPTINVVPTSPSTPSAPTINIGIQPPSITPLSITTPDSVDAPNVVSPQIKPVDFTVDPGGDSNAYSSEKHNSHQGWKASWSKTINVTELTNRNYVSLTRDTADSTIPTDQVINVTKENNRAMVVDEVRKNGIVVDFKGTINLQRSQNVGIDLQGTHQGSKSDPLIANIYNSGKIIGNAKYGSTANKEQIAFGFNNADGSNNTTMTNMVNKGEITLNAPSSAGIQLKPEDPHDWQPNSWNAAPLQIDNKTPNKIKGRVLMKADNQKDINLNGSGSFGMVTVFNEGVPKRLFAPSYVTNYENLRSERTYDGERVLPGGEIGRSALSDSKYTSGVYNTGNININGDSSIGVGLLQEIQEVKLAGNINIGTKAVTQETGISNLPNAGSKTYSINKVEEAVGVFAGVPTMPVKPGETDTLINGSGARNTATSLVGTETVEINGNISLGEHATQSIGALVGDTEVDLNKGQLTENGVNKGSNADRKLKRSGDITAKSNSIINVGGKKNYGFVVSNSAHSSKFGTTVDSLEYKVDKTHHGKGINEGKINVTGDESVGFAMIKGGDSKSSGIISVGNNAENSIGFYGKEDSFTNSGTIEVTSAKKKNKAVVLDGTNASNKINFTNTGNIYVNTSDNGNKNLDGDGNIGIYAQGNYKIEHNSGIVKAGKDAIAFYVKNSTGEVNINAPIELANSNKATTIGIYSDGDAKVKFGASSSLKIGEKAVGLYSADPTKFNNTFEIETGKTLNVELGKNSTFGLLNGNKNVTNSPLLSKYLNNNTTDKINITKFDEGASLFYATLKAKAILDEDYKVTNADAASTSVLVANDGANVEIASGKKLETNTNVGLVATKGAGASLSTSVAENKGTLISTRTDKGIGIYTYTANGENSGTIIMKNQNSVGILGSGGSNLKNTGKIELEAISSAGVYAENSNMINSGTASEIVVKKKASVGIYARETSISSVPKNVKNEGKIEIKADGDGKSAGIYSKKEGGAKLTIENTGNIEVAQKASAGIYAKNESNQANTESVVTNSGLIKMSAENSIGIMGEKSKVENSGTGTKGIEIAGKKSAGILVTKESEVVNSGRILLANNSILASSDGLVGISVDGSSTGENDASGEIKIDAAYSTGMLSSGGDITNAGKIDLEKKESIGIYATNANVTNNGATTKGIFIKDEKSVGIYSKINSSSTADKIVTNSGTIDIGGTSKTGSAGIYSIVENGATKRLSTVSSGNITISQKESVGIYAKNKSSQANIESVVTNSGNGKIEVKNEGSAGILVEKSKVTNTAVGTNGIIVSAKKSAGIIGKLGSEIINSGIIKTETATPTAAADGVVGISLNASKATNDSNGTITLDTNYSTGMFGENSSTAINEGNITGTNKENIVGMAGKATTVTNKKTITLSAKKSTGIFGEDNSTLLNDTNGNITVKEESSVGIYSKGNNKIAENKGIILAEKKKSAGMLGSEGKLENSNSITTQDEESAGMYVENSSATNKKTITANGKKSAGVYVKLDKAAGGTIAGTNEGTNATITMTNEGSAAMLGEVKSLVTNNSATLTLTNQNSIVVNTKETVGMMITNDTTGIPNSNVKALNTGTIDLNSGATNKDNIGILANKRATGINEKNINVNSKSSVGMLAKEGSNIENNTTFSTINLKAESGIGMLADGKDASGNISTALNNARIVATSIGKRSLGMLAQNNGKVGNNKNIDILAENGVGIFVSETGVGENTSTGTISLENKESVGIFAKNNGTNDTAKNSGTINLGKADGSTSHESLIGMFAQAESGKTASVKNTKDININTKKSVGMYAKNDASNITDVDLENTGDININSQESAGIYAPKSNISKVGTITLKNSTVSNGSSAVYVSNGGKVADTASAKINLGKVNQNRVAYYVNGKDSALAGANIGKITGYGVGVYLQGASGDKATLDSNTSKLDYTAQGTGNGIIGLLLKGETDIQSYIKGIKVGNTVPRSNPSDKDKYAIGIYADAQGTAGTPYNITTPITAGKSGVGIFADKDSNINYTGNMEIGDGTTAGTGIFITKKIGATGGRVTLGSNTIKLKGTKGVVAIASEGTEFNGGTATIELEGKDVQGVGVYGKKGSDVDVSHWNFNNHGNSAEEVRSEEGKVHINGNKNLKPRMVLTHVINGETSIVTGKTVTSVNDGTITAKENIGLMAEGIKNHGMTIWQEGNFEAVNHGTIDFSAAEKSTAMFINSARGKNDGTIKVGKNSIGIYGFYNKDTRKYEGAPASPDPNKLEIETTSNSKISLGDASTGMYLINAEKIENKGGQITSESGATKNVGIYAVNGQDSINVNNKNLTMTTAANIALGNGSVGLYSKGQSYTVRNSVTNTGNITVGDKMTGSPSVAMYAENTNLTTDSKITVGKDGIAFYGKNSDITAKGSANFSNKGVLAYLENSKFISHLGNLGATQNTMLYLKNSIAQLDGAGTKVDMDVADGYTGAYIEGNSTLTGVKTIKLGQDSTGLFLKDANFVSNAESITGTKDKARGILATNSNLTNNSKIFLSGAESIGIYSNANNTKSVVNNGELTIAGKKTLGVFLKGSQSLENKANINIADSANSLEPTIGIYTAEGSSNIRHTSGTIDVGQKSIGIYSTTNSNVEMNGGKIHVKDQGIGIYKQNGKATIKGELDIDTHIATTKDSEPTGVYAVNGTEINDQASKISIGAKSYGFILNNTDVNNTNIYNNTDAGTVTMGNDSVFLYSNGKAIINNKRDISANNSNHLIAFYIKNGGDFTNNGTIDFSTGKGNIGIYAPGGKATNKGRILVGATDDIDPMTGKVYTDVSKTVYGIGMAADNGGHIVNEGEIRIYNNKSIGMYGKGVGTTVENKGTISLDGSRATATNKIQSMTGVYVDDGATFKNYGTITTTDSYAGRDGKVNENVTGLAGVAVMNGSTLENHGKIYIDADNSYGVLIRGKRDTKGNVERYAVIKNYGEIKVRGKGTWGISWKDVSQADIDELQKQINSKISSDPERQALREAEGTDKNYQGVTITVKDGKPTFLRNGVPISDSEVEQIGKLIGKESNLGMSDIGFYVDTLGRTKPIDIDGANPPINSQLIIGTEYSEKTNKKQWFVKGDVIKPFLDQIQGRNFKLTSIAGSLTWIATPVLDNYGQITGVAMAKLPYTSFVKKTDNAWNFTDGLEQRYDMNALDSVEKRIFNKLNGIGKNEEALLTQAYDEMMGHQYANVQQRGGGSGGGSGGGSMKMEELFKKHKIVAVLRANSVEEAKKKALAVFLGGVHLIEITFTVPDADTVIKELSFLKEMGAIIGAGTVTSVEQARKAVESGAEFIVSPHLDEEISQFAKEKGVFYMPGVMTPTELVKAMKLGHTILKLFPGEVVGPQFVKAMKGPFPNVKFVPTGGVNLDNVCEWFKAGVLAVGVGSALVKGTPVEVAEKAKAFVEKIRGCTE

SEQ ID NO: 52 - protein, 3540 aa, Fusobacterium nucleatum
METDTLLLWVLLLWVPGSTGDEVNTEQMKVVPTREEIVSSKENLKNSVGGLQTKINDARSENEKALKGLRLELIQLMEQGNQVVKSPWSSWQFGMNYFYDHWGSEYKGRGDKPQKYLFNGIYTRGNWKVRNAMDVAENQRVGGRPLTPGNDSLNSWKNANNSSNSGVKIDRDNSISSSTNGNRSWGLVDLENLREPTNEVEILARISPKEVTKQAISLNITEPTVQTLEAPDVNPQVNEPLPAPVIDLPEVETVTINPLTINAPDAPTAPSAPTINIGITAPSAPSAPTINVVPTSPSTPSAPTINIGIQPPSITPLSITTPDSVDAPNVVSPQIKPVDFTVDPGGDSNAYSSEKHNSHQGWKASWSKTINVTELTNRNYVSLTRDTADSTIPTDQVINVTKENNRAMVVDEVRKNGIVVDFKGTINLQRSQNVGIDLQGTHQGSKSDPLIANIYNSGKIIGNAKYGSTANKEQIAFGFNNADGSNNTTMTNMVNKGEITLNAPSSAGIQLKPEDPHDWQPNSWNAAPLQIDNKTPNKIKGRVLMKADNQKDINLNGSGSFGMVTVFNEGVPKRLFAPSYVTNYENLRSERTYDGERVLPGGEIGRSALSDSKYTSGVYNTGNININGDSSIGVGLLQEIQEVKLAGNINIGTKAVTQETGISNLPNAGSKTYSINKVEEAVGVFAGVPTMPVKPGETDTLINGSGARNTATSLVGTETVEINGNISLGEHATQSIGALVGDTEVDLNKGQLTENGVNKGSNADRKLKRSGDITAKSNSIINVGGKKNYGFVVSNSAHSSKFGTTVDSLEYKVDKTHHGKGINEGKINVTGDESVGFAMIKGGDSKSSGIISVGNNAENSIGFYGKEDSFTNSGTIEVTSAKKKNKAVVLDGTNASNKINFTNTGNIYVNTSDNGNKNLDGDGNIGIYAQGNYKIEHNSGIVKAGKDAIAFYVKNSTGEVNINAPIELANSNKATTIGIYSDGDAKVKFGASSSLKIGEKAVGLYSADPTKFNNTFEIETGKTLNVELGKNSTFGLLNGNKNVTNSPLLSKYLNNNTTDKINITKFDEGASLFYATLKAKAILDEDYKVTNADAASTSVLVANDGANVEIASGKKLETNTNVGLVATKGAGASLSTSVAENKGTLISTRTDKGIGIYTYTANGENSGTIIMKNQNSVGILGSGGSNLKNTGKIELEAISSAGVYAENSNMINSGTASEIVVKKKASVGIYARETSISSVPKNVKNEGKIEIKADGDGKSAGIYSKKEGGAKLTIENTGNIEVAQKASAGIYAKNESNQANTESVVTNSGLIKMSAENSIGIMGEKSKVENSGTGTKGIEIAGKKSAGILVTKESEVVNSGRILLANNSILASSDGLVGISVDGSSTGENDASGEIKIDAAYSTGMLSSGGDITNAGKIDLEKKESIGIYATNANVTNNGATTKGIFIKDEKSVGIYSKINSSSTADKIVTNSGTIDIGGTSKTGSAGIYSIVENGATKRLSTVSSGNITISQKESVGIYAKNKSSQANIESVVTNSGNGKIEVKNEGSAGILVEKSKVTNTAVGTNGIIVSAKKSAGIIGKLGSEIINSGIIKTETATPTAAADGVVGISLNASKATNDSNGTITLDTNYSTGMFGENSSTAINEGNITGTNKENIVGMAGKATTVTNKKTITLSAKKSTGIFGEDNSTLLNDTNGNITVKEESSVGIYSKGNNKIAENKGIILAEKKKSAGMLGSEGKLENSNSITTQDEESAGMYVENSSATNKKTITANGKKSAGVYVKLDKAAGGTIAGTNEGTNATITMTNEGSAAMLGEVKSLVTNNSATLTLTNQNSIVVNTKETVGMMITNDTTGIPNSNVKALNTGTIDLNSGATNKDNIGILANKRATGINEKNINVNSKSSVGMLAKEGSNIENNTTFSTINLKAESGIGMLADGKDASGNISTALNNARIVATSIGKRSLGMLAQNNGKVGNNKNIDILAENGVGIFVSETGVGENTSTGTISLENKESVGIFAKNNGTNDTAKNSGTINLGKADGSTSHESLIGMFAQAESGKTASVKNTKDININTKKSVGMYAKNDASNITDVDLENTGDININSQESAGIYAPKSNISKVGTITLKNSTVSNGSSAVYVSNGGKVADTASAKINLGKVNQNRVAYYVNGKDSALAGANIGKITGYGVGVYLQGASGDKATLDSNTSKLDYTAQGTGNGIIGLLLKGETDIQSYIKGIKVGNTVPRSNPSDKDKYAIGIYADAQGTAGTPYNITTPITAGKSGVGIFADKDSNINYTGNMEIGDGTTAGTGIFITKKIGATGGRVTLGSNTIKLKGTKGVVAIASEGTEFNGGTATIELEGKDVQGVGVYGKKGSDVDVSHWNFNNHGNSAEEVRSEEGKVHINGNKNLKPRMVLTHVINGETSIVTGKTVTSVNDGTITAKENIGLMAEGIKNHGMTIWQEGNFEAVNHGTIDFSAAEKSTAMFINSARGKNDGTIKVGKNSIGIYGFYNKDTRKYEGAPASPDPNKLEIETTSNSKISLGDASTGMYLINAEKIENKGGQITSESGATKNVGIYAVNGQDSINVNNKNLTMTTAANIALGNGSVGLYSKGQSYTVRNSVTNTGNITVGDKMTGSPSVAMYAENTNLTTDSKITVGKDGIAFYGKNSDITAKGSANFSNKGVLAYLENSKFISHLGNLGATQNTMLYLKNSIAQLDGAGTKVDMDVADGYTGAYIEGNSTLTGVKTIKLGQDSTGLFLKDANFVSNAESITGTKDKARGILATNSNLTNNSKIFLSGAESIGIYSNANNTKSVVNNGELTIAGKKTLGVFLKGSQSLENKANINIADSANSLEPTIGIYTAEGSSNIRHTSGTIDVGQKSIGIYSTTNSNVEMNGGKIHVKDQGIGIYKQNGKATIKGELDIDTHIATTKDSEPTGVYAVNGTEINDQASKISIGAKSYGFILNNTDVNNTNIYNNTDAGTVTMGNDSVFLYSNGKAIINNKRDISANNSNHLIAFYIKNGGDFTNNGTIDFSTGKGNIGIYAPGGKATNKGRILVGATDDIDPMTGKVYTDVSKTVYGIGMAADNGGHIVNEGEIRIYNNKSIGMYGKGVGTTVENKGTISLDGSRATATNKIQSMTGVYVDDGATFKNYGTITTTDSYAGRDGKVNENVTGLAGVAVMNGSTLENHGKIYIDADNSYGVLIRGKRDTKGNVERYAVIKNYGEIKVRGKGTWGISWKDVSQADIDELQKQINSKISSDPERQALREAEGTDKNYQGVTITVKDGKPTFLRNGVPISDSEVEQIGKLIGKESNLGMSDIGFYVDTLGRTKPIDIDGANPPINSQLIIGTEYSEKTNKKQWFVKGDVIKPFLDQIQGRNFKLTSIAGSLTWIATPVLDNYGQITGVAMAKLPYTSFVKKTDNAWNFTDGLEQRYDMNALDSVEKRIFNKLNGIGKNEEALLTQAYDEMMGHQYANVQQRGGGSAVGQDTQEVIVVPHSLPFKVVVISAILALVVLTIISLIILIMLWQKKPRGGGSAWSHPQFEK

SEQ ID NO: 53 - protein, 493 aa, Fusobacterium nucleatum
METDTLLLWVLLLWVPGSTGDEVNTEQMKVVPTREEIVSSKENLKNSVGGLQTKINDARSENEKALKGLRLELIQLMEQGNQVVKSPWSSWQFGMNYFYDHWGSEYKGRGDKPQKYLFNGIYTRGNWKVRNAMDVAENQRVGGRPLTPGNDSLNSWKNANNSSNSGVKIDRDNSISSSTNGNRSWGLVDLENLREPTNEVEILARISPKEVTKQAISLNITEPTVQTLEAPDVNPQVNEPLPAPVIDLPEVETVTINPLTINAPDAPTAPSAPTINIGITAPSAPSAPTINVVPTSPSTPSAPTINIGIQPPSITPLSITTPDSVDAPNVVSPQIKPVDFTVDPGGDSNAGGGSGGGSGGGSMANKPMQPITSTANKIVWSDPTRLSTTFSASLLRQRVKVGIAELNNVSGQYVSVYKRPAPKPEGCADACVIMPNENQSIRTVISGSAENLATLKAEWETHKRNVDTLFASGNAGLGFLDPTAAIVSSDTTA

SEQ ID NO: 54 - protein, 437 aa, Fusobacterium nucleatum
METDTLLLWVLLLWVPGSTGDEVNTEQMKVVPTREEIVSSKENLKNSVGGLQTKINDARSENEKALKGLRLELIQLMEQGNQVVKSPWSSWQFGMNYFYDHWGSEYKGRGDKPQKYLFNGIYTRGNWKVRNAMDVAENQRVGGRPLTPGNDSLNSWKNANNSSNSGVKIDRDNSISSSTNGNRSWGLVDLENLREPTNEVEILARISPKEVTKQAISLNITEPTVQTLEAPDVNPQVNEPLPAPVIDLPEVETVTINPLTINAPDAPTAPSAPTINIGITAPSAPSAPTINVVPTSPSTPSAPTINIGIQPPSITPLSITTPDSVDAPNVVSPQIKPVDFTVDPGGDSNAGGGSPPEDPPDSKNTLVLFGAGFGAVITVVVIVVIIKCFCKHRSCFRRNEASRETNNSLTFGPEEALAEQTVFLGGGSAWSHPQFEK

SEQ ID NO: 55 - protein, 616 aa, Fusobacterium nucleatum
METDTLLLWVLLLWVPGSTGDEVNTEQMKVVPTREEIVSSKENLKNSVGGLQTKINDARSENEKALKGLRLELIQLMEQGNQVVKSPWSSWQFGMNYFYDHWGSEYKGRGDKPQKYLFNGIYTRGNWKVRNAMDVAENQRVGGRPLTPGNDSLNSWKNANNSSNSGVKIDRDNSISSSTNGNRSWGLVDLENLREPTNEVEILARISPKEVTKQAISLNITEPTVQTLEAPDVNPQVNEPLPAPVIDLPEVETVTINPLTINAPDAPTAPSAPTINIGITAPSAPSAPTINVVPTSPSTPSAPTINIGIQPPSITPLSITTPDSVDAPNVVSPQIKPVDFTVDPGGDSNAGGGSGGGSGGGSPAAAEEKAAPAAAKPATTEGEFPETREKMSGIRRAIAKAMVHSKHTAPHVTLMDEADVTKLVAHRKKFKAIAAEKGIKLTFLPYVVKALVSALREYPVLNTSIDDETEEIIQKHYYNIGIAADTDRGLLVPVIKHADRKPIFALAQEINELAEKARDGKLTPGEMKGASCTITNIGSAGGQWFTPVINHPEVAILGIGRIAEKPIVRDGEIVAAPMLALSLSFDHRMIDGATAQKALNHIKRLLSDPELLLMEA

SEQ ID NO: 56 - protein, 535 aa, Fusobacterium nucleatum
METDTLLLWVLLLWVPGSTGDEVNTEQMKVVPTREEIVSSKENLKNSVGGLQTKINDARSENEKALKGLRLELIQLMEQGNQVVKSPWSSWQFGMNYFYDHWGSEYKGRGDKPQKYLFNGIYTRGNWKVRNAMDVAENQRVGGRPLTPGNDSLNSWKNANNSSNSGVKIDRDNSISSSTNGNRSWGLVDLENLREPTNEVEILARISPKEVTKQAISLNITEPTVQTLEAPDVNPQVNEPLPAPVIDLPEVETVTINPLTINAPDAPTAPSAPTINIGITAPSAPSAPTINVVPTSPSTPSAPTINIGIQPPSITPLSITTPDSVDAPNVVSPQIKPVDFTVDPGGDSNAGGGSGGGSGGGSESQVRQQFSKDIIKLLNEQVNKEMNSSNLYMSMSSWCYTHSLDGAGLFLFDHAAEEYEHAKKLIIFLNENNVPVQLTSISAPEHKFEGLTQIFQKAYEHEQHISESINNIVDHAIKSKDHATFNFLQWYVAEQHEEEVLFKDILDKIELIGNENHGLYLADQYVKGIAKSRKS

SEQ ID NO: 57 - protein, 389 aa, Fusobacterium nucleatum
METDTLLLWVLLLWVPGSTGDEVNTEQMKVVPTREEIVSSKENLKNSVGGLQTKINDARSENEKALKGLRLELIQLMEQGNQVVKSPWSSWQFGMNYFYDHWGSEYKGRGDKPQKYLFNGIYTRGNWKVRNAMDVAENQRVGGRPLTPGNDSLNSWKNANNSSNSGVKIDRDNSISSSTNGNRSWGLVDLENLREPTNEVEILARISPKEVTKQAISLNITEPTVQTLEAPDVNPQVNEPLPAPVIDLPEVETVTINPLTINAPDAPTAPSAPTINIGITAPSAPSAPTINVVPTSPSTPSAPTINIGIQPPSITPLSITTPDSVDAPNVVSPQIKPVDFTVDPGGDSNAGGGSGGGSGGGSGYIPEAPRDGQAYVRKDGEWVLLSTFL

SEQ ID NO: 58 - protein, 567 aa, Fusobacterium nucleatum
METDTLLLWVLLLWVPGSTGDEVNTEQMKVVPTREEIVSSKENLKNSVGGLQTKINDARSENEKALKGLRLELIQLMEQGNQVVKSPWSSWQFGMNYFYDHWGSEYKGRGDKPQKYLFNGIYTRGNWKVRNAMDVAENQRVGGRPLTPGNDSLNSWKNANNSSNSGVKIDRDNSISSSTNGNRSWGLVDLENLREPTNEVEILARISPKEVTKQAISLNITEPTVQTLEAPDVNPQVNEPLPAPVIDLPEVETVTINPLTINAPDAPTAPSAPTINIGITAPSAPSAPTINVVPTSPSTPSAPTINIGIQPPSITPLSITTPDSVDAPNVVSPQIKPVDFTVDPGGDSNAGGGSGGGSGGGSMKMEELFKKHKIVAVLRANSVEEAKKKALAVFLGGVHLIEITFTVPDADTVIKELSFLKEMGAIIGAGTVTSVEQARKAVESGAEFIVSPHLDEEISQFAKEKGVFYMPGVMTPTELVKAMKLGHTILKLFPGEVVGPQFVKAMKGPFPNVKFVPTGGVNLDNVCEWFKAGVLAVGVGSALVKGTPVEVAEKAKAFVEKIRGCTE

SEQ ID NO: 59 - protein, 416 aa, Fusobacterium nucleatum
METDTLLLWVLLLWVPGSTGDEVNTEQMKVVPTREEIVSSKENLKNSVGGLQTKINDARSENEKALKGLRLELIQLMEQGNQVVKSPWSSWQFGMNYFYDHWGSEYKGRGDKPQKYLFNGIYTRGNWKVRNAMDVAENQRVGGRPLTPGNDSLNSWKNANNSSNSGVKIDRDNSISSSTNGNRSWGLVDLENLREPTNEVEILARISPKEVTKQAISLNITEPTVQTLEAPDVNPQVNEPLPAPVIDLPEVETVTINPLTINAPDAPTAPSAPTINIGITAPSAPSAPTINVVPTSPSTPSAPTINIGIQPPSITPLSITTPDSVDAPNVVSPQIKPVDFTVDPGGDSNAGGGSAVGQDTQEVIVVPHSLPFKVVVISAILALVVLTIISLIILIMLWQKKPRGGGSAWSHPQFEK

SEQ ID NO: 60 - protein, 1202 aa, Fusobacterium nucleatum
METDTLLLWVLLLWVPGSTGDEVNTEQMKVVPTREEIVSSKENLKNSVGGLQTKINDARSENEKALKGLRLELIQLMEQGNQVVKSPWSSWQFGMNYFYDHWGSEYKGRGDKPQKYLFNGIYTRGNWKVRNAMDVAENQRVGGRPLTPGNDSLNSWKNANNSSNSGVKIDRDNSISSSTNGNRSWGLVDLENLREPTNEVEILARISPKEVTKQAISLNITEPTVQTLEAPDVNPQVNEPLPAPVIDLPEVETVTINPLTINAPDAPTAPSAPTINIGITAPSAPSAPTINVVPTSPSTPSAPTINIGIQPPSITPLSITTPDSVDAPNVVSPQIKPVDFTVDPGGDSNAYSSEKHNSHQGWKASWSKTINVTELTNRNYVSLTRDTADSTIPTDQVINVTKENNRAMVVDEVRKNGIVVDFKGTINLQRSQNVGIDLQGTHQGSKSDPLIANIYNSGKIIGNAKYGSTANKEQIAFGFNNADGSNNTTMTNMVNKGEITLNAPSSAGIQLKPEDPHDWQPNSWNAAPLQIDNKTPNKIKGRVLMKADNQKDINLNGSGSFGMVTVFNEGVPKRLFAPSYVTNYENLRSERTYDGERVLPGGEIGRSALSDSKYTSGVYNTGNININGDSSIGVGLLQEIQEVKLAGNINIGTKAVTQETGISNLPNAGSKTYSINKVEEAVGVFAGVPTMPVKPGETDTLINGSGARNTATSLVGTETVEINGNISLGEHATQSIGALVGDTEVDLNKGQLTENGVNKGSNADRKLKRSGDITAKSNSIINVGGKKNYGFVVSNSAHSSKFGTTVDSLEYKVDKTHHGKGINEGKINVTGDESVGFAMIKGGDSKSSGIISVGNNAENSIGFYGKEDSFTNSGTIEVTSAKKKNKAVVLDGTNASNKINFTNTGNIYVNTSDNGNKNLDGDGNIGIYAQGNYKIEHNSGIVKAGKDAIAFYVKNSTGEVNINAPIELANSNKATTIGIYSDGDAKVKFGASSSLKIGEKAVGLYSADPTKFNNTFEIETGKTLNVELGKNSTFGLLNGNKNVTNSPLLSKYLNNNTTDGGGSGGGSGGGSMANKPMQPITSTANKIVWSDPTRLSTTFSASLLRQRVKVGIAELNNVSGQYVSVYKRPAPKPEGCADACVIMPNENQSIRTVISGSAENLATLKAEWETHKRNVDTLFASGNAGLGFLDPTAAIVSSDTTA

SEQ ID NO: 61 - protein, 1146 aa, Fusobacterium nucleatum
METDTLLLWVLLLWVPGSTGDEVNTEQMKVVPTREEIVSSKENLKNSVGGLQTKINDARSENEKALKGLRLELIQLMEQGNQVVKSPWSSWQFGMNYFYDHWGSEYKGRGDKPQKYLFNGIYTRGNWKVRNAMDVAENQRVGGRPLTPGNDSLNSWKNANNSSNSGVKIDRDNSISSSTNGNRSWGLVDLENLREPTNEVEILARISPKEVTKQAISLNITEPTVQTLEAPDVNPQVNEPLPAPVIDLPEVETVTINPLTINAPDAPTAPSAPTINIGITAPSAPSAPTINVVPTSPSTPSAPTINIGIQPPSITPLSITTPDSVDAPNVVSPQIKPVDFTVDPGGDSNAYSSEKHNSHQGWKASWSKTINVTELTNRNYVSLTRDTADSTIPTDQVINVTKENNRAMVVDEVRKNGIVVDFKGTINLQRSQNVGIDLQGTHQGSKSDPLIANIYNSGKIIGNAKYGSTANKEQIAFGFNNADGSNNTTMTNMVNKGEITLNAPSSAGIQLKPEDPHDWQPNSWNAAPLQIDNKTPNKIKGRVLMKADNQKDINLNGSGSFGMVTVFNEGVPKRLFAPSYVTNYENLRSERTYDGERVLPGGEIGRSALSDSKYTSGVYNTGNININGDSSIGVGLLQEIQEVKLAGNINIGTKAVTQETGISNLPNAGSKTYSINKVEEAVGVFAGVPTMPVKPGETDTLINGSGARNTATSLVGTETVEINGNISLGEHATQSIGALVGDTEVDLNKGQLTENGVNKGSNADRKLKRSGDITAKSNSIINVGGKKNYGFVVSNSAHSSKFGTTVDSLEYKVDKTHHGKGINEGKINVTGDESVGFAMIKGGDSKSSGIISVGNNAENSIGFYGKEDSFTNSGTIEVTSAKKKNKAVVLDGTNASNKINFTNTGNIYVNTSDNGNKNLDGDGNIGIYAQGNYKIEHNSGIVKAGKDAIAFYVKNSTGEVNINAPIELANSNKATTIGIYSDGDAKVKFGASSSLKIGEKAVGLYSADPTKFNNTFEIETGKTLNVELGKNSTFGLLNGNKNVTNSPLLSKYLNNNTTDGGGSPPEDPPDSKNTLVLFGAGFGAVITVVVIVVIIKCFCKHRSCFRRNEASRETNNSLTFGPEEALAEQTVFLGGGSAWSHPQFEK

SEQ ID NO: 62 - protein, 1325 aa, Fusobacterium nucleatum
METDTLLLWVLLLWVPGSTGDEVNTEQMKVVPTREEIVSSKENLKNSVGGLQTKINDARSENEKALKGLRLELIQLMEQGNQVVKSPWSSWQFGMNYFYDHWGSEYKGRGDKPQKYLFNGIYTRGNWKVRNAMDVAENQRVGGRPLTPGNDSLNSWKNANNSSNSGVKIDRDNSISSSTNGNRSWGLVDLENLREPTNEVEILARISPKEVTKQAISLNITEPTVQTLEAPDVNPQVNEPLPAPVIDLPEVETVTINPLTINAPDAPTAPSAPTINIGITAPSAPSAPTINVVPTSPSTPSAPTINIGIQPPSITPLSITTPDSVDAPNVVSPQIKPVDFTVDPGGDSNAYSSEKHNSHQGWKASWSKTINVTELTNRNYVSLTRDTADSTIPTDQVINVTKENNRAMVVDEVRKNGIVVDFKGTINLQRSQNVGIDLQGTHQGSKSDPLIANIYNSGKIIGNAKYGSTANKEQIAFGFNNADGSNNTTMTNMVNKGEITLNAPSSAGIQLKPEDPHDWQPNSWNAAPLQIDNKTPNKIKGRVLMKADNQKDINLNGSGSFGMVTVFNEGVPKRLFAPSYVTNYENLRSERTYDGERVLPGGEIGRSALSDSKYTSGVYNTGNININGDSSIGVGLLQEIQEVKLAGNINIGTKAVTQETGISNLPNAGSKTYSINKVEEAVGVFAGVPTMPVKPGETDTLINGSGARNTATSLVGTETVEINGNISLGEHATQSIGALVGDTEVDLNKGQLTENGVNKGSNADRKLKRSGDITAKSNSIINVGGKKNYGFVVSNSAHSSKFGTTVDSLEYKVDKTHHGKGINEGKINVTGDESVGFAMIKGGDSKSSGIISVGNNAENSIGFYGKEDSFTNSGTIEVTSAKKKNKAVVLDGTNASNKINFTNTGNIYVNTSDNGNKNLDGDGNIGIYAQGNYKIEHNSGIVKAGKDAIAFYVKNSTGEVNINAPIELANSNKATTIGIYSDGDAKVKFGASSSLKIGEKAVGLYSADPTKFNNTFEIETGKTLNVELGKNSTFGLLNGNKNVTNSPLLSKYLNNNTTDGGGSGGGSGGGSPAAAEEKAAPAAAKPATTEGEFPETREKMSGIRRAIAKAMVHSKHTAPHVTLMDEADVTKLVAHRKKFKAIAAEKGIKLTFLPYVVKALVSALREYPVLNTSIDDETEEIIQKHYYNIGIAADTDRGLLVPVIKHADRKPIFALAQEINELAEKARDGKLTPGEMKGASCTITNIGSAGGQWFTPVINHPEVAILGIGRIAEKPIVRDGEIVAAPMLALSLSFDHRMIDGATAQKALNHIKRLLSDPELLLMEA

SEQ ID NO: 63 - protein, 1244 aa, Fusobacterium nucleatum
METDTLLLWVLLLWVPGSTGDEVNTEQMKVVPTREEIVSSKENLKNSVGGLQTKINDARSENEKALKGLRLELIQLMEQGNQVVKSPWSSWQFGMNYFYDHWGSEYKGRGDKPQKYLFNGIYTRGNWKVRNAMDVAENQRVGGRPLTPGNDSLNSWKNANNSSNSGVKIDRDNSISSSTNGNRSWGLVDLENLREPTNEVEILARISPKEVTKQAISLNITEPTVQTLEAPDVNPQVNEPLPAPVIDLPEVETVTINPLTINAPDAPTAPSAPTINIGITAPSAPSAPTINVVPTSPSTPSAPTINIGIQPPSITPLSITTPDSVDAPNVVSPQIKPVDFTVDPGGDSNAYSSEKHNSHQGWKASWSKTINVTELTNRNYVSLTRDTADSTIPTDQVINVTKENNRAMVVDEVRKNGIVVDFKGTINLQRSQNVGIDLQGTHQGSKSDPLIANIYNSGKIIGNAKYGSTANKEQIAFGFNNADGSNNTTMTNMVNKGEITLNAPSSAGIQLKPEDPHDWQPNSWNAAPLQIDNKTPNKIKGRVLMKADNQKDINLNGSGSFGMVTVFNEGVPKRLFAPSYVTNYENLRSERTYDGERVLPGGEIGRSALSDSKYTSGVYNTGNININGDSSIGVGLLQEIQEVKLAGNINIGTKAVTQETGISNLPNAGSKTYSINKVEEAVGVFAGVPTMPVKPGETDTLINGSGARNTATSLVGTETVEINGNISLGEHATQSIGALVGDTEVDLNKGQLTENGVNKGSNADRKLKRSGDITAKSNSIINVGGKKNYGFVVSNSAHSSKFGTTVDSLEYKVDKTHHGKGINEGKINVTGDESVGFAMIKGGDSKSSGIISVGNNAENSIGFYGKEDSFTNSGTIEVTSAKKKNKAVVLDGTNASNKINFTNTGNIYVNTSDNGNKNLDGDGNIGIYAQGNYKIEHNSGIVKAGKDAIAFYVKNSTGEVNINAPIELANSNKATTIGIYSDGDAKVKFGASSSLKIGEKAVGLYSADPTKFNNTFEIETGKTLNVELGKNSTFGLLNGNKNVTNSPLLSKYLNNNTTDGGGSGGGSGGGSESQVRQQFSKDIIKLLNEQVNKEMNSSNLYMSMSSWCYTHSLDGAGLFLFDHAAEEYEHAKKLIIFLNENNVPVQLTSISAPEHKFEGLTQIFQKAYEHEQHISESINNIVDHAIKSKDHATFNFLQWYVAEQHEEEVLFKDILDKIELIGNENHGLYLADQYVKGIAKSRKS

SEQ ID NO: 64 - protein, 1098 aa, Fusobacterium nucleatum
METDTLLLWVLLLWVPGSTGDEVNTEQMKVVPTREEIVSSKENLKNSVGGLQTKINDARSENEKALKGLRLELIQLMEQGNQVVKSPWSSWQFGMNYFYDHWGSEYKGRGDKPQKYLFNGIYTRGNWKVRNAMDVAENQRVGGRPLTPGNDSLNSWKNANNSSNSGVKIDRDNSISSSTNGNRSWGLVDLENLREPTNEVEILARISPKEVTKQAISLNITEPTVQTLEAPDVNPQVNEPLPAPVIDLPEVETVTINPLTINAPDAPTAPSAPTINIGITAPSAPSAPTINVVPTSPSTPSAPTINIGIQPPSITPLSITTPDSVDAPNVVSPQIKPVDFTVDPGGDSNAYSSEKHNSHQGWKASWSKTINVTELTNRNYVSLTRDTADSTIPTDQVINVTKENNRAMVVDEVRKNGIVVDFKGTINLQRSQNVGIDLQGTHQGSKSDPLIANIYNSGKIIGNAKYGSTANKEQIAFGFNNADGSNNTTMTNMVNKGEITLNAPSSAGIQLKPEDPHDWQPNSWNAAPLQIDNKTPNKIKGRVLMKADNQKDINLNGSGSFGMVTVFNEGVPKRLFAPSYVTNYENLRSERTYDGERVLPGGEIGRSALSDSKYTSGVYNTGNININGDSSIGVGLLQEIQEVKLAGNINIGTKAVTQETGISNLPNAGSKTYSINKVEEAVGVFAGVPTMPVKPGETDTLINGSGARNTATSLVGTETVEINGNISLGEHATQSIGALVGDTEVDLNKGQLTENGVNKGSNADRKLKRSGDITAKSNSIINVGGKKNYGFVVSNSAHSSKFGTTVDSLEYKVDKTHHGKGINEGKINVTGDESVGFAMIKGGDSKSSGIISVGNNAENSIGFYGKEDSFTNSGTIEVTSAKKKNKAVVLDGTNASNKINFTNTGNIYVNTSDNGNKNLDGDGNIGIYAQGNYKIEHNSGIVKAGKDAIAFYVKNSTGEVNINAPIELANSNKATTIGIYSDGDAKVKFGASSSLKIGEKAVGLYSADPTKFNNTFEIETGKTLNVELGKNSTFGLLNGNKNVTNSPLLSKYLNNNTTDGGGSGGGSGGGSGYIPEAPRDGQAYVRKDGEWVLLSTFL

SEQ ID NO: 65 - protein, 1276 aa, Fusobacterium nucleatum
METDTLLLWVLLLWVPGSTGDEVNTEQMKVVPTREEIVSSKENLKNSVGGLQTKINDARSENEKALKGLRLELIQLMEQGNQVVKSPWSSWQFGMNYFYDHWGSEYKGRGDKPQKYLFNGIYTRGNWKVRNAMDVAENQRVGGRPLTPGNDSLNSWKNANNSSNSGVKIDRDNSISSSTNGNRSWGLVDLENLREPTNEVEILARISPKEVTKQAISLNITEPTVQTLEAPDVNPQVNEPLPAPVIDLPEVETVTINPLTINAPDAPTAPSAPTINIGITAPSAPSAPTINVVPTSPSTPSAPTINIGIQPPSITPLSITTPDSVDAPNVVSPQIKPVDFTVDPGGDSNAYSSEKHNSHQGWKASWSKTINVTELTNRNYVSLTRDTADSTIPTDQVINVTKENNRAMVVDEVRKNGIVVDFKGTINLQRSQNVGIDLQGTHQGSKSDPLIANIYNSGKIIGNAKYGSTANKEQIAFGFNNADGSNNTTMTNMVNKGEITLNAPSSAGIQLKPEDPHDWQPNSWNAAPLQIDNKTPNKIKGRVLMKADNQKDINLNGSGSFGMVTVFNEGVPKRLFAPSYVTNYENLRSERTYDGERVLPGGEIGRSALSDSKYTSGVYNTGNININGDSSIGVGLLQEIQEVKLAGNINIGTKAVTQETGISNLPNAGSKTYSINKVEEAVGVFAGVPTMPVKPGETDTLINGSGARNTATSLVGTETVEINGNISLGEHATQSIGALVGDTEVDLNKGQLTENGVNKGSNADRKLKRSGDITAKSNSIINVGGKKNYGFVVSNSAHSSKFGTTVDSLEYKVDKTHHGKGINEGKINVTGDESVGFAMIKGGDSKSSGIISVGNNAENSIGFYGKEDSFTNSGTIEVTSAKKKNKAVVLDGTNASNKINFTNTGNIYVNTSDNGNKNLDGDGNIGIYAQGNYKIEHNSGIVKAGKDAIAFYVKNSTGEVNINAPIELANSNKATTIGIYSDGDAKVKFGASSSLKIGEKAVGLYSADPTKFNNTFEIETGKTLNVELGKNSTFGLLNGNKNVTNSPLLSKYLNNNTTDGGGSGGGSGGGSMKMEELFKKHKIVAVLRANSVEEAKKKALAVFLGGVHLIEITFTVPDADTVIKELSFLKEMGAIIGAGTVTSVEQARKAVESGAEFIVSPHLDEEISQFAKEKGVFYMPGVMTPTELVKAMKLGHTILKLFPGEVVGPQFVKAMKGPFPNVKFVPTGGVNLDNVCEWFKAGVLAVGVGSALVKGTPVEVAEKAKAFVEKIRGCTE

SEQ ID NO: 66 - protein, 1125 aa, Fusobacterium nucleatum
METDTLLLWVLLLWVPGSTGDEVNTEQMKVVPTREEIVSSKENLKNSVGGLQTKINDARSENEKALKGLRLELIQLMEQGNQVVKSPWSSWQFGMNYFYDHWGSEYKGRGDKPQKYLFNGIYTRGNWKVRNAMDVAENQRVGGRPLTPGNDSLNSWKNANNSSNSGVKIDRDNSISSSTNGNRSWGLVDLENLREPTNEVEILARISPKEVTKQAISLNITEPTVQTLEAPDVNPQVNEPLPAPVIDLPEVETVTINPLTINAPDAPTAPSAPTINIGITAPSAPSAPTINVVPTSPSTPSAPTINIGIQPPSITPLSITTPDSVDAPNVVSPQIKPVDFTVDPGGDSNAYSSEKHNSHQGWKASWSKTINVTELTNRNYVSLTRDTADSTIPTDQVINVTKENNRAMVVDEVRKNGIVVDFKGTINLQRSQNVGIDLQGTHQGSKSDPLIANIYNSGKIIGNAKYGSTANKEQIAFGFNNADGSNNTTMTNMVNKGEITLNAPSSAGIQLKPEDPHDWQPNSWNAAPLQIDNKTPNKIKGRVLMKADNQKDINLNGSGSFGMVTVFNEGVPKRLFAPSYVTNYENLRSERTYDGERVLPGGEIGRSALSDSKYTSGVYNTGNININGDSSIGVGLLQEIQEVKLAGNINIGTKAVTQETGISNLPNAGSKTYSINKVEEAVGVFAGVPTMPVKPGETDTLINGSGARNTATSLVGTETVEINGNISLGEHATQSIGALVGDTEVDLNKGQLTENGVNKGSNADRKLKRSGDITAKSNSIINVGGKKNYGFVVSNSAHSSKFGTTVDSLEYKVDKTHHGKGINEGKINVTGDESVGFAMIKGGDSKSSGIISVGNNAENSIGFYGKEDSFTNSGTIEVTSAKKKNKAVVLDGTNASNKINFTNTGNIYVNTSDNGNKNLDGDGNIGIYAQGNYKIEHNSGIVKAGKDAIAFYVKNSTGEVNINAPIELANSNKATTIGIYSDGDAKVKFGASSSLKIGEKAVGLYSADPTKFNNTFEIETGKTLNVELGKNSTFGLLNGNKNVTNSPLLSKYLNNNTTDGGGSAVGQDTQEVIVVPHSLPFKVVVISAILALVVLTIISLIILIMLWQKKPRGGGSAWSHPQFEK

SEQ ID NO: 67 - protein, 1749 aa, Fusobacterium nucleatum
METDTLLLWVLLLWVPGSTGDEVNTEQMKVVPTREEIVSSKENLKNSVGGLQTKINDARSENEKALKGLRLELIQLMEQGNQVVKSPWSSWQFGMNYFYDHWGSEYKGRGDKPQKYLFNGIYTRGNWKVRNAMDVAENQRVGGRPLTPGNDSLNSWKNANNSSNSGVKIDRDNSISSSTNGNRSWGLVDLENLREPTNEVEILARISPKEVTKQAISLNITEPTVQTLEAPDVNPQVNEPLPAPVIDLPEVETVTINPLTINAPDAPTAPSAPTINIGITAPSAPSAPTINVVPTSPSTPSAPTINIGIQPPSITPLSITTPDSVDAPNVVSPQIKPVDFTVDPGGDSNAYSSEKHNSHQGWKASWSKTINVTELTNRNYVSLTRDTADSTIPTDQVINVTKENNRAMVVDEVRKNGIVVDFKGTINLQRSQNVGIDLQGTHQGSKSDPLIANIYNSGKIIGNAKYGSTANKEQIAFGFNNADGSNNTTMTNMVNKGEITLNAPSSAGIQLKPEDPHDWQPNSWNAAPLQIDNKTPNKIKGRVLMKADNQKDINLNGSGSFGMVTVFNEGVPKRLFAPSYVTNYENLRSERTYDGERVLPGGEIGRSALSDSKYTSGVYNTGNININGDSSIGVGLLQEIQEVKLAGNINIGTKAVTQETGISNLPNAGSKTYSINKVEEAVGVFAGVPTMPVKPGETDTLINGSGARNTATSLVGTETVEINGNISLGEHATQSIGALVGDTEVDLNKGQLTENGVNKGSNADRKLKRSGDITAKSNSIINVGGKKNYGFVVSNSAHSSKFGTTVDSLEYKVDKTHHGKGINEGKINVTGDESVGFAMIKGGDSKSSGIISVGNNAENSIGFYGKEDSFTNSGTIEVTSAKKKNKAVVLDGTNASNKINFTNTGNIYVNTSDNGNKNLDGDGNIGIYAQGNYKIEHNSGIVKAGKDAIAFYVKNSTGEVNINAPIELANSNKATTIGIYSDGDAKVKFGASSSLKIGEKAVGLYSADPTKFNNTFEIETGKTLNVELGKNSTFGLLNGNKNVTNSPLLSKYLNNNTTDKINITKFDEGASLFYATLKAKAILDEDYKVTNADAASTSVLVANDGANVEIASGKKLETNTNVGLVATKGAGASLSTSVAENKGTLISTRTDKGIGIYTYTANGENSGTIIMKNQNSVGILGSGGSNLKNTGKIELEAISSAGVYAENSNMINSGTASEIVVKKKASVGIYARETSISSVPKNVKNEGKIEIKADGDGKSAGIYSKKEGGAKLTIENTGNIEVAQKASAGIYAKNESNQANTESVVTNSGLIKMSAENSIGIMGEKSKVENSGTGTKGIEIAGKKSAGILVTKESEVVNSGRILLANNSILASSDGLVGISVDGSSTGENDASGEIKIDAAYSTGMLSSGGDITNAGKIDLEKKESIGIYATNANVTNNGATTKGIFIKDEKSVGIYSKINSSSTADKIVTNSGTIDIGGTSKTGSAGIYSIVENGATKRLSTVSSGNITISQKESVGIYAKNKSSQANIESVVTNSGNGKIEVKNEGSAGILVEKSKVTNTAVGTNGIIVSAKKSAGIIGKLGSEIINSGIIKTETATPTAAADGVGGGSGGGSGGGSMANKPMQPITSTANKIVWSDPTRLSTTFSASLLRQRVKVGIAELNNVSGQYVSVYKRPAPKPEGCADACVIMPNENQSIRTVISGSAENLATLKAEWETHKRNVDTLFASGNAGLGFLDPTAAIVSSDTTA

SEQ ID NO: 68 - protein, 1693 aa, Fusobacterium nucleatum
METDTLLLWVLLLWVPGSTGDEVNTEQMKVVPTREEIVSSKENLKNSVGGLQTKINDARSENEKALKGLRLELIQLMEQGNQVVKSPWSSWQFGMNYFYDHWGSEYKGRGDKPQKYLFNGIYTRGNWKVRNAMDVAENQRVGGRPLTPGNDSLNSWKNANNSSNSGVKIDRDNSISSSTNGNRSWGLVDLENLREPTNEVEILARISPKEVTKQAISLNITEPTVQTLEAPDVNPQVNEPLPAPVIDLPEVETVTINPLTINAPDAPTAPSAPTINIGITAPSAPSAPTINVVPTSPSTPSAPTINIGIQPPSITPLSITTPDSVDAPNVVSPQIKPVDFTVDPGGDSNAYSSEKHNSHQGWKASWSKTINVTELTNRNYVSLTRDTADSTIPTDQVINVTKENNRAMVVDEVRKNGIVVDFKGTINLQRSQNVGIDLQGTHQGSKSDPLIANIYNSGKIIGNAKYGSTANKEQIAFGFNNADGSNNTTMTNMVNKGEITLNAPSSAGIQLKPEDPHDWQPNSWNAAPLQIDNKTPNKIKGRVLMKADNQKDINLNGSGSFGMVTVFNEGVPKRLFAPSYVTNYENLRSERTYDGERVLPGGEIGRSALSDSKYTSGVYNTGNININGDSSIGVGLLQEIQEVKLAGNINIGTKAVTQETGISNLPNAGSKTYSINKVEEAVGVFAGVPTMPVKPGETDTLINGSGARNTATSLVGTETVEINGNISLGEHATQSIGALVGDTEVDLNKGQLTENGVNKGSNADRKLKRSGDITAKSNSIINVGGKKNYGFVVSNSAHSSKFGTTVDSLEYKVDKTHHGKGINEGKINVTGDESVGFAMIKGGDSKSSGIISVGNNAENSIGFYGKEDSFTNSGTIEVTSAKKKNKAVVLDGTNASNKINFTNTGNIYVNTSDNGNKNLDGDGNIGIYAQGNYKIEHNSGIVKAGKDAIAFYVKNSTGEVNINAPIELANSNKATTIGIYSDGDAKVKFGASSSLKIGEKAVGLYSADPTKFNNTFEIETGKTLNVELGKNSTFGLLNGNKNVTNSPLLSKYLNNNTTDKINITKFDEGASLFYATLKAKAILDEDYKVTNADAASTSVLVANDGANVEIASGKKLETNTNVGLVATKGAGASLSTSVAENKGTLISTRTDKGIGIYTYTANGENSGTIIMKNQNSVGILGSGGSNLKNTGKIELEAISSAGVYAENSNMINSGTASEIVVKKKASVGIYARETSISSVPKNVKNEGKIEIKADGDGKSAGIYSKKEGGAKLTIENTGNIEVAQKASAGIYAKNESNQANTESVVTNSGLIKMSAENSIGIMGEKSKVENSGTGTKGIEIAGKKSAGILVTKESEVVNSGRILLANNSILASSDGLVGISVDGSSTGENDASGEIKIDAAYSTGMLSSGGDITNAGKIDLEKKESIGIYATNANVTNNGATTKGIFIKDEKSVGIYSKINSSSTADKIVTNSGTIDIGGTSKTGSAGIYSIVENGATKRLSTVSSGNITISQKESVGIYAKNKSSQANIESVVTNSGNGKIEVKNEGSAGILVEKSKVTNTAVGTNGIIVSAKKSAGIIGKLGSEIINSGIIKTETATPTAAADGVGGGSPPEDPPDSKNTLVLFGAGFGAVITVVVIVVIIKCFCKHRSCFRRNEASRETNNSLTFGPEEALAEQTVFLGGGSAWSHPQFEK

SEQ ID NO: 69 - protein, 1872 aa, Fusobacterium nucleatum
METDTLLLWVLLLWVPGSTGDEVNTEQMKVVPTREEIVSSKENLKNSVGGLQTKINDARSENEKALKGLRLELIQLMEQGNQVVKSPWSSWQFGMNYFYDHWGSEYKGRGDKPQKYLFNGIYTRGNWKVRNAMDVAENQRVGGRPLTPGNDSLNSWKNANNSSNSGVKIDRDNSISSSTNGNRSWGLVDLENLREPTNEVEILARISPKEVTKQAISLNITEPTVQTLEAPDVNPQVNEPLPAPVIDLPEVETVTINPLTINAPDAPTAPSAPTINIGITAPSAPSAPTINVVPTSPSTPSAPTINIGIQPPSITPLSITTPDSVDAPNVVSPQIKPVDFTVDPGGDSNAYSSEKHNSHQGWKASWSKTINVTELTNRNYVSLTRDTADSTIPTDQVINVTKENNRAMVVDEVRKNGIVVDFKGTINLQRSQNVGIDLQGTHQGSKSDPLIANIYNSGKIIGNAKYGSTANKEQIAFGFNNADGSNNTTMTNMVNKGEITLNAPSSAGIQLKPEDPHDWQPNSWNAAPLQIDNKTPNKIKGRVLMKADNQKDINLNGSGSFGMVTVFNEGVPKRLFAPSYVTNYENLRSERTYDGERVLPGGEIGRSALSDSKYTSGVYNTGNININGDSSIGVGLLQEIQEVKLAGNINIGTKAVTQETGISNLPNAGSKTYSINKVEEAVGVFAGVPTMPVKPGETDTLINGSGARNTATSLVGTETVEINGNISLGEHATQSIGALVGDTEVDLNKGQLTENGVNKGSNADRKLKRSGDITAKSNSIINVGGKKNYGFVVSNSAHSSKFGTTVDSLEYKVDKTHHGKGINEGKINVTGDESVGFAMIKGGDSKSSGIISVGNNAENSIGFYGKEDSFTNSGTIEVTSAKKKNKAVVLDGTNASNKINFTNTGNIYVNTSDNGNKNLDGDGNIGIYAQGNYKIEHNSGIVKAGKDAIAFYVKNSTGEVNINAPIELANSNKATTIGIYSDGDAKVKFGASSSLKIGEKAVGLYSADPTKFNNTFEIETGKTLNVELGKNSTFGLLNGNKNVTNSPLLSKYLNNNTTDKINITKFDEGASLFYATLKAKAILDEDYKVTNADAASTSVLVANDGANVEIASGKKLETNTNVGLVATKGAGASLSTSVAENKGTLISTRTDKGIGIYTYTANGENSGTIIMKNQNSVGILGSGGSNLKNTGKIELEAISSAGVYAENSNMINSGTASEIVVKKKASVGIYARETSISSVPKNVKNEGKIEIKADGDGKSAGIYSKKEGGAKLTIENTGNIEVAQKASAGIYAKNESNQANTESVVTNSGLIKMSAENSIGIMGEKSKVENSGTGTKGIEIAGKKSAGILVTKESEVVNSGRILLANNSILASSDGLVGISVDGSSTGENDASGEIKIDAAYSTGMLSSGGDITNAGKIDLEKKESIGIYATNANVTNNGATTKGIFIKDEKSVGIYSKINSSSTADKIVTNSGTIDIGGTSKTGSAGIYSIVENGATKRLSTVSSGNITISQKESVGIYAKNKSSQANIESVVTNSGNGKIEVKNEGSAGILVEKSKVTNTAVGTNGIIVSAKKSAGIIGKLGSEIINSGIIKTETATPTAAADGVGGGSGGGSGGGSPAAAEEKAAPAAAKPATTEGEFPETREKMSGIRRAIAKAMVHSKHTAPHVTLMDEADVTKLVAHRKKFKAIAAEKGIKLTFLPYVVKALVSALREYPVLNTSIDDETEEIIQKHYYNIGIAADTDRGLLVPVIKHADRKPIFALAQEINELAEKARDGKLTPGEMKGASCTITNIGSAGGQWFTPVINHPEVAILGIGRIAEKPIVRDGEIVAAPMLALSLSFDHRMIDGATAQKALNHIKRLLSDPELLLMEA

SEQ ID NO: 70 - protein, 1791 aa, Fusobacterium nucleatum
METDTLLLWVLLLWVPGSTGDEVNTEQMKVVPTREEIVSSKENLKNSVGGLQTKINDARSENEKALKGLRLELIQLMEQGNQVVKSPWSSWQFGMNYFYDHWGSEYKGRGDKPQKYLFNGIYTRGNWKVRNAMDVAENQRVGGRPLTPGNDSLNSWKNANNSSNSGVKIDRDNSISSSTNGNRSWGLVDLENLREPTNEVEILARISPKEVTKQAISLNITEPTVQTLEAPDVNPQVNEPLPAPVIDLPEVETVTINPLTINAPDAPTAPSAPTINIGITAPSAPSAPTINVVPTSPSTPSAPTINIGIQPPSITPLSITTPDSVDAPNVVSPQIKPVDFTVDPGGDSNAYSSEKHNSHQGWKASWSKTINVTELTNRNYVSLTRDTADSTIPTDQVINVTKENNRAMVVDEVRKNGIVVDFKGTINLQRSQNVGIDLQGTHQGSKSDPLIANIYNSGKIIGNAKYGSTANKEQIAFGFNNADGSNNTTMTNMVNKGEITLNAPSSAGIQLKPEDPHDWQPNSWNAAPLQIDNKTPNKIKGRVLMKADNQKDINLNGSGSFGMVTVFNEGVPKRLFAPSYVTNYENLRSERTYDGERVLPGGEIGRSALSDSKYTSGVYNTGNININGDSSIGVGLLQEIQEVKLAGNINIGTKAVTQETGISNLPNAGSKTYSINKVEEAVGVFAGVPTMPVKPGETDTLINGSGARNTATSLVGTETVEINGNISLGEHATQSIGALVGDTEVDLNKGQLTENGVNKGSNADRKLKRSGDITAKSNSIINVGGKKNYGFVVSNSAHSSKFGTTVDSLEYKVDKTHHGKGINEGKINVTGDESVGFAMIKGGDSKSSGIISVGNNAENSIGFYGKEDSFTNSGTIEVTSAKKKNKAVVLDGTNASNKINFTNTGNIYVNTSDNGNKNLDGDGNIGIYAQGNYKIEHNSGIVKAGKDAIAFYVKNSTGEVNINAPIELANSNKATTIGIYSDGDAKVKFGASSSLKIGEKAVGLYSADPTKFNNTFEIETGKTLNVELGKNSTFGLLNGNKNVTNSPLLSKYLNNNTTDKINITKFDEGASLFYATLKAKAILDEDYKVTNADAASTSVLVANDGANVEIASGKKLETNTNVGLVATKGAGASLSTSVAENKGTLISTRTDKGIGIYTYTANGENSGTIIMKNQNSVGILGSGGSNLKNTGKIELEAISSAGVYAENSNMINSGTASEIVVKKKASVGIYARETSISSVPKNVKNEGKIEIKADGDGKSAGIYSKKEGGAKLTIENTGNIEVAQKASAGIYAKNESNQANTESVVTNSGLIKMSAENSIGIMGEKSKVENSGTGTKGIEIAGKKSAGILVTKESEVVNSGRILLANNSILASSDGLVGISVDGSSTGENDASGEIKIDAAYSTGMLSSGGDITNAGKIDLEKKESIGIYATNANVTNNGATTKGIFIKDEKSVGIYSKINSSSTADKIVTNSGTIDIGGTSKTGSAGIYSIVENGATKRLSTVSSGNITISQKESVGIYAKNKSSQANIESVVTNSGNGKIEVKNEGSAGILVEKSKVTNTAVGTNGIIVSAKKSAGIIGKLGSEIINSGIIKTETATPTAAADGVGGGSGGGSGGGSESQVRQQFSKDIIKLLNEQVNKEMNSSNLYMSMSSWCYTHSLDGAGLFLFDHAAEEYEHAKKLIIFLNENNVPVQLTSISAPEHKFEGLTQIFQKAYEHEQHISESINNIVDHAIKSKDHATFNFLQWYVAEQHEEEVLFKDILDKIELIGNENHGLYLADQYVKGIAKSRKS

SEQ ID NO: 71 - protein, 1645 aa, Fusobacterium nucleatum
METDTLLLWVLLLWVPGSTGDEVNTEQMKVVPTREEIVSSKENLKNSVGGLQTKINDARSENEKALKGLRLELIQLMEQGNQVVKSPWSSWQFGMNYFYDHWGSEYKGRGDKPQKYLFNGIYTRGNWKVRNAMDVAENQRVGGRPLTPGNDSLNSWKNANNSSNSGVKIDRDNSISSSTNGNRSWGLVDLENLREPTNEVEILARISPKEVTKQAISLNITEPTVQTLEAPDVNPQVNEPLPAPVIDLPEVETVTINPLTINAPDAPTAPSAPTINIGITAPSAPSAPTINVVPTSPSTPSAPTINIGIQPPSITPLSITTPDSVDAPNVVSPQIKPVDFTVDPGGDSNAYSSEKHNSHQGWKASWSKTINVTELTNRNYVSLTRDTADSTIPTDQVINVTKENNRAMVVDEVRKNGIVVDFKGTINLQRSQNVGIDLQGTHQGSKSDPLIANIYNSGKIIGNAKYGSTANKEQIAFGFNNADGSNNTTMTNMVNKGEITLNAPSSAGIQLKPEDPHDWQPNSWNAAPLQIDNKTPNKIKGRVLMKADNQKDINLNGSGSFGMVTVFNEGVPKRLFAPSYVTNYENLRSERTYDGERVLPGGEIGRSALSDSKYTSGVYNTGNININGDSSIGVGLLQEIQEVKLAGNINIGTKAVTQETGISNLPNAGSKTYSINKVEEAVGVFAGVPTMPVKPGETDTLINGSGARNTATSLVGTETVEINGNISLGEHATQSIGALVGDTEVDLNKGQLTENGVNKGSNADRKLKRSGDITAKSNSIINVGGKKNYGFVVSNSAHSSKFGTTVDSLEYKVDKTHHGKGINEGKINVTGDESVGFAMIKGGDSKSSGIISVGNNAENSIGFYGKEDSFTNSGTIEVTSAKKKNKAVVLDGTNASNKINFTNTGNIYVNTSDNGNKNLDGDGNIGIYAQGNYKIEHNSGIVKAGKDAIAFYVKNSTGEVNINAPIELANSNKATTIGIYSDGDAKVKFGASSSLKIGEKAVGLYSADPTKFNNTFEIETGKTLNVELGKNSTFGLLNGNKNVTNSPLLSKYLNNNTTDKINITKFDEGASLFYATLKAKAILDEDYKVTNADAASTSVLVANDGANVEIASGKKLETNTNVGLVATKGAGASLSTSVAENKGTLISTRTDKGIGIYTYTANGENSGTIIMKNQNSVGILGSGGSNLKNTGKIELEAISSAGVYAENSNMINSGTASEIVVKKKASVGIYARETSISSVPKNVKNEGKIEIKADGDGKSAGIYSKKEGGAKLTIENTGNIEVAQKASAGIYAKNESNQANTESVVTNSGLIKMSAENSIGIMGEKSKVENSGTGTKGIEIAGKKSAGILVTKESEVVNSGRILLANNSILASSDGLVGISVDGSSTGENDASGEIKIDAAYSTGMLSSGGDITNAGKIDLEKKESIGIYATNANVTNNGATTKGIFIKDEKSVGIYSKINSSSTADKIVTNSGTIDIGGTSKTGSAGIYSIVENGATKRLSTVSSGNITISQKESVGIYAKNKSSQANIESVVTNSGNGKIEVKNEGSAGILVEKSKVTNTAVGTNGIIVSAKKSAGIIGKLGSEIINSGIIKTETATPTAAADGVGGGSGGGSGGGSGYIPEAPRDGQAYVRKDGEWVLLSTFL

SEQ ID NO: 72 - protein, 1823 aa, Fusobacterium nucleatum
METDTLLLWVLLLWVPGSTGDEVNTEQMKVVPTREEIVSSKENLKNSVGGLQTKINDARSENEKALKGLRLELIQLMEQGNQVVKSPWSSWQFGMNYFYDHWGSEYKGRGDKPQKYLFNGIYTRGNWKVRNAMDVAENQRVGGRPLTPGNDSLNSWKNANNSSNSGVKIDRDNSISSSTNGNRSWGLVDLENLREPTNEVEILARISPKEVTKQAISLNITEPTVQTLEAPDVNPQVNEPLPAPVIDLPEVETVTINPLTINAPDAPTAPSAPTINIGITAPSAPSAPTINVVPTSPSTPSAPTINIGIQPPSITPLSITTPDSVDAPNVVSPQIKPVDFTVDPGGDSNAYSSEKHNSHQGWKASWSKTINVTELTNRNYVSLTRDTADSTIPTDQVINVTKENNRAMVVDEVRKNGIVVDFKGTINLQRSQNVGIDLQGTHQGSKSDPLIANIYNSGKIIGNAKYGSTANKEQIAFGFNNADGSNNTTMTNMVNKGEITLNAPSSAGIQLKPEDPHDWQPNSWNAAPLQIDNKTPNKIKGRVLMKADNQKDINLNGSGSFGMVTVFNEGVPKRLFAPSYVTNYENLRSERTYDGERVLPGGEIGRSALSDSKYTSGVYNTGNININGDSSIGVGLLQEIQEVKLAGNINIGTKAVTQETGISNLPNAGSKTYSINKVEEAVGVFAGVPTMPVKPGETDTLINGSGARNTATSLVGTETVEINGNISLGEHATQSIGALVGDTEVDLNKGQLTENGVNKGSNADRKLKRSGDITAKSNSIINVGGKKNYGFVVSNSAHSSKFGTTVDSLEYKVDKTHHGKGINEGKINVTGDESVGFAMIKGGDSKSSGIISVGNNAENSIGFYGKEDSFTNSGTIEVTSAKKKNKAVVLDGTNASNKINFTNTGNIYVNTSDNGNKNLDGDGNIGIYAQGNYKIEHNSGIVKAGKDAIAFYVKNSTGEVNINAPIELANSNKATTIGIYSDGDAKVKFGASSSLKIGEKAVGLYSADPTKFNNTFEIETGKTLNVELGKNSTFGLLNGNKNVTNSPLLSKYLNNNTTDKINITKFDEGASLFYATLKAKAILDEDYKVTNADAASTSVLVANDGANVEIASGKKLETNTNVGLVATKGAGASLSTSVAENKGTLISTRTDKGIGIYTYTANGENSGTIIMKNQNSVGILGSGGSNLKNTGKIELEAISSAGVYAENSNMINSGTASEIVVKKKASVGIYARETSISSVPKNVKNEGKIEIKADGDGKSAGIYSKKEGGAKLTIENTGNIEVAQKASAGIYAKNESNQANTESVVTNSGLIKMSAENSIGIMGEKSKVENSGTGTKGIEIAGKKSAGILVTKESEVVNSGRILLANNSILASSDGLVGISVDGSSTGENDASGEIKIDAAYSTGMLSSGGDITNAGKIDLEKKESIGIYATNANVTNNGATTKGIFIKDEKSVGIYSKINSSSTADKIVTNSGTIDIGGTSKTGSAGIYSIVENGATKRLSTVSSGNITISQKESVGIYAKNKSSQANIESVVTNSGNGKIEVKNEGSAGILVEKSKVTNTAVGTNGIIVSAKKSAGIIGKLGSEIINSGIIKTETATPTAAADGVGGGSGGGSGGGSMKMEELFKKHKIVAVLRANSVEEAKKKALAVFLGGVHLIEITFTVPDADTVIKELSFLKEMGAIIGAGTVTSVEQARKAVESGAEFIVSPHLDEEISQFAKEKGVFYMPGVMTPTELVKAMKLGHTILKLFPGEVVGPQFVKAMKGPFPNVKFVPTGGVNLDNVCEWFKAGVLAVGVGSALVKGTPVEVAEKAKAFVEKIRGCTE

SEQ ID NO: 73 - protein, 1672 aa, Fusobacterium nucleatum
METDTLLLWVLLLWVPGSTGDEVNTEQMKVVPTREEIVSSKENLKNSVGGLQTKINDARSENEKALKGLRLELIQLMEQGNQVVKSPWSSWQFGMNYFYDHWGSEYKGRGDKPQKYLFNGIYTRGNWKVRNAMDVAENQRVGGRPLTPGNDSLNSWKNANNSSNSGVKIDRDNSISSSTNGNRSWGLVDLENLREPTNEVEILARISPKEVTKQAISLNITEPTVQTLEAPDVNPQVNEPLPAPVIDLPEVETVTINPLTINAPDAPTAPSAPTINIGITAPSAPSAPTINVVPTSPSTPSAPTINIGIQPPSITPLSITTPDSVDAPNVVSPQIKPVDFTVDPGGDSNAYSSEKHNSHQGWKASWSKTINVTELTNRNYVSLTRDTADSTIPTDQVINVTKENNRAMVVDEVRKNGIVVDFKGTINLQRSQNVGIDLQGTHQGSKSDPLIANIYNSGKIIGNAKYGSTANKEQIAFGFNNADGSNNTTMTNMVNKGEITLNAPSSAGIQLKPEDPHDWQPNSWNAAPLQIDNKTPNKIKGRVLMKADNQKDINLNGSGSFGMVTVFNEGVPKRLFAPSYVTNYENLRSERTYDGERVLPGGEIGRSALSDSKYTSGVYNTGNININGDSSIGVGLLQEIQEVKLAGNINIGTKAVTQETGISNLPNAGSKTYSINKVEEAVGVFAGVPTMPVKPGETDTLINGSGARNTATSLVGTETVEINGNISLGEHATQSIGALVGDTEVDLNKGQLTENGVNKGSNADRKLKRSGDITAKSNSIINVGGKKNYGFVVSNSAHSSKFGTTVDSLEYKVDKTHHGKGINEGKINVTGDESVGFAMIKGGDSKSSGIISVGNNAENSIGFYGKEDSFTNSGTIEVTSAKKKNKAVVLDGTNASNKINFTNTGNIYVNTSDNGNKNLDGDGNIGIYAQGNYKIEHNSGIVKAGKDAIAFYVKNSTGEVNINAPIELANSNKATTIGIYSDGDAKVKFGASSSLKIGEKAVGLYSADPTKFNNTFEIETGKTLNVELGKNSTFGLLNGNKNVTNSPLLSKYLNNNTTDKINITKFDEGASLFYATLKAKAILDEDYKVTNADAASTSVLVANDGANVEIASGKKLETNTNVGLVATKGAGASLSTSVAENKGTLISTRTDKGIGIYTYTANGENSGTIIMKNQNSVGILGSGGSNLKNTGKIELEAISSAGVYAENSNMINSGTASEIVVKKKASVGIYARETSISSVPKNVKNEGKIEIKADGDGKSAGIYSKKEGGAKLTIENTGNIEVAQKASAGIYAKNESNQANTESVVTNSGLIKMSAENSIGIMGEKSKVENSGTGTKGIEIAGKKSAGILVTKESEVVNSGRILLANNSILASSDGLVGISVDGSSTGENDASGEIKIDAAYSTGMLSSGGDITNAGKIDLEKKESIGIYATNANVTNNGATTKGIFIKDEKSVGIYSKINSSSTADKIVTNSGTIDIGGTSKTGSAGIYSIVENGATKRLSTVSSGNITISQKESVGIYAKNKSSQANIESVVTNSGNGKIEVKNEGSAGILVEKSKVTNTAVGTNGIIVSAKKSAGIIGKLGSEIINSGIIKTETATPTAAADGVGGGSAVGQDTQEVIVVPHSLPFKVVVISAILALVVLTIISLIILIMLWQKKPRGGGSAWSHPQFEK

SEQ ID NO: 74 - protein, 2396 aa, Fusobacterium nucleatum
METDTLLLWVLLLWVPGSTGDEVNTEQMKVVPTREEIVSSKENLKNSVGGLQTKINDARSENEKALKGLRLELIQLMEQGNQVVKSPWSSWQFGMNYFYDHWGSEYKGRGDKPQKYLFNGIYTRGNWKVRNAMDVAENQRVGGRPLTPGNDSLNSWKNANNSSNSGVKIDRDNSISSSTNGNRSWGLVDLENLREPTNEVEILARISPKEVTKQAISLNITEPTVQTLEAPDVNPQVNEPLPAPVIDLPEVETVTINPLTINAPDAPTAPSAPTINIGITAPSAPSAPTINVVPTSPSTPSAPTINIGIQPPSITPLSITTPDSVDAPNVVSPQIKPVDFTVDPGGDSNAYSSEKHNSHQGWKASWSKTINVTELTNRNYVSLTRDTADSTIPTDQVINVTKENNRAMVVDEVRKNGIVVDFKGTINLQRSQNVGIDLQGTHQGSKSDPLIANIYNSGKIIGNAKYGSTANKEQIAFGFNNADGSNNTTMTNMVNKGEITLNAPSSAGIQLKPEDPHDWQPNSWNAAPLQIDNKTPNKIKGRVLMKADNQKDINLNGSGSFGMVTVFNEGVPKRLFAPSYVTNYENLRSERTYDGERVLPGGEIGRSALSDSKYTSGVYNTGNININGDSSIGVGLLQEIQEVKLAGNINIGTKAVTQETGISNLPNAGSKTYSINKVEEAVGVFAGVPTMPVKPGETDTLINGSGARNTATSLVGTETVEINGNISLGEHATQSIGALVGDTEVDLNKGQLTENGVNKGSNADRKLKRSGDITAKSNSIINVGGKKNYGFVVSNSAHSSKFGTTVDSLEYKVDKTHHGKGINEGKINVTGDESVGFAMIKGGDSKSSGIISVGNNAENSIGFYGKEDSFTNSGTIEVTSAKKKNKAVVLDGTNASNKINFTNTGNIYVNTSDNGNKNLDGDGNIGIYAQGNYKIEHNSGIVKAGKDAIAFYVKNSTGEVNINAPIELANSNKATTIGIYSDGDAKVKFGASSSLKIGEKAVGLYSADPTKFNNTFEIETGKTLNVELGKNSTFGLLNGNKNVTNSPLLSKYLNNNTTDKINITKFDEGASLFYATLKAKAILDEDYKVTNADAASTSVLVANDGANVEIASGKKLETNTNVGLVATKGAGASLSTSVAENKGTLISTRTDKGIGIYTYTANGENSGTIIMKNQNSVGILGSGGSNLKNTGKIELEAISSAGVYAENSNMINSGTASEIVVKKKASVGIYARETSISSVPKNVKNEGKIEIKADGDGKSAGIYSKKEGGAKLTIENTGNIEVAQKASAGIYAKNESNQANTESVVTNSGLIKMSAENSIGIMGEKSKVENSGTGTKGIEIAGKKSAGILVTKESEVVNSGRILLANNSILASSDGLVGISVDGSSTGENDASGEIKIDAAYSTGMLSSGGDITNAGKIDLEKKESIGIYATNANVTNNGATTKGIFIKDEKSVGIYSKINSSSTADKIVTNSGTIDIGGTSKTGSAGIYSIVENGATKRLSTVSSGNITISQKESVGIYAKNKSSQANIESVVTNSGNGKIEVKNEGSAGILVEKSKVTNTAVGTNGIIVSAKKSAGIIGKLGSEIINSGIIKTETATPTAAADGVVGISLNASKATNDSNGTITLDTNYSTGMFGENSSTAINEGNITGTNKENIVGMAGKATTVTNKKTITLSAKKSTGIFGEDNSTLLNDTNGNITVKEESSVGIYSKGNNKIAENKGIILAEKKKSAGMLGSEGKLENSNSITTQDEESAGMYVENSSATNKKTITANGKKSAGVYVKLDKAAGGTIAGTNEGTNATITMTNEGSAAMLGEVKSLVTNNSATLTLTNQNSIVVNTKETVGMMITNDTTGIPNSNVKALNTGTIDLNSGATNKDNIGILANKRATGINEKNINVNSKSSVGMLAKEGSNIENNTTFSTINLKAESGIGMLADGKDASGNISTALNNARIVATSIGKRSLGMLAQNNGKVGNNKNIDILAENGVGIFVSETGVGENTSTGTISLENKESVGIFAKNNGTNDTAKNSGTINLGKADGSTSHESLIGMFAQAESGKTASVKNTKDININTKKSVGMYAKNDASNITDVDLENTGDININSQESAGIYAPKSNISKVGTITLKNSTVSNGSSAVYVSNGGKVADTASAKINLGKVNQNRVAYYVNGKDSALAGANIGKITGYGVGVYLQGASGDKATLDSNTSKLDYTAQGTGNGIIGLLLKGETDIQSYIKGIKVGNTVPRSNPSDKDKYAIGGGGSGGGSGGGSMANKPMQPITSTANKIVWSDPTRLSTTFSASLLRQRVKVGIAELNNVSGQYVSVYKRPAPKPEGCADACVIMPNENQSIRTVISGSAENLATLKAEWETHKRNVDTLFASGNAGLGFLDPTAAIVSSDTTA

SEQ ID NO: 75 - protein, 2340 aa, Fusobacterium nucleatum
METDTLLLWVLLLWVPGSTGDEVNTEQMKVVPTREEIVSSKENLKNSVGGLQTKINDARSENEKALKGLRLELIQLMEQGNQVVKSPWSSWQFGMNYFYDHWGSEYKGRGDKPQKYLFNGIYTRGNWKVRNAMDVAENQRVGGRPLTPGNDSLNSWKNANNSSNSGVKIDRDNSISSSTNGNRSWGLVDLENLREPTNEVEILARISPKEVTKQAISLNITEPTVQTLEAPDVNPQVNEPLPAPVIDLPEVETVTINPLTINAPDAPTAPSAPTINIGITAPSAPSAPTINVVPTSPSTPSAPTINIGIQPPSITPLSITTPDSVDAPNVVSPQIKPVDFTVDPGGDSNAYSSEKHNSHQGWKASWSKTINVTELTNRNYVSLTRDTADSTIPTDQVINVTKENNRAMVVDEVRKNGIVVDFKGTINLQRSQNVGIDLQGTHQGSKSDPLIANIYNSGKIIGNAKYGSTANKEQIAFGFNNADGSNNTTMTNMVNKGEITLNAPSSAGIQLKPEDPHDWQPNSWNAAPLQIDNKTPNKIKGRVLMKADNQKDINLNGSGSFGMVTVFNEGVPKRLFAPSYVTNYENLRSERTYDGERVLPGGEIGRSALSDSKYTSGVYNTGNININGDSSIGVGLLQEIQEVKLAGNINIGTKAVTQETGISNLPNAGSKTYSINKVEEAVGVFAGVPTMPVKPGETDTLINGSGARNTATSLVGTETVEINGNISLGEHATQSIGALVGDTEVDLNKGQLTENGVNKGSNADRKLKRSGDITAKSNSIINVGGKKNYGFVVSNSAHSSKFGTTVDSLEYKVDKTHHGKGINEGKINVTGDESVGFAMIKGGDSKSSGIISVGNNAENSIGFYGKEDSFTNSGTIEVTSAKKKNKAVVLDGTNASNKINFTNTGNIYVNTSDNGNKNLDGDGNIGIYAQGNYKIEHNSGIVKAGKDAIAFYVKNSTGEVNINAPIELANSNKATTIGIYSDGDAKVKFGASSSLKIGEKAVGLYSADPTKFNNTFEIETGKTLNVELGKNSTFGLLNGNKNVTNSPLLSKYLNNNTTDKINITKFDEGASLFYATLKAKAILDEDYKVTNADAASTSVLVANDGANVEIASGKKLETNTNVGLVATKGAGASLSTSVAENKGTLISTRTDKGIGIYTYTANGENSGTIIMKNQNSVGILGSGGSNLKNTGKIELEAISSAGVYAENSNMINSGTASEIVVKKKASVGIYARETSISSVPKNVKNEGKIEIKADGDGKSAGIYSKKEGGAKLTIENTGNIEVAQKASAGIYAKNESNQANTESVVTNSGLIKMSAENSIGIMGEKSKVENSGTGTKGIEIAGKKSAGILVTKESEVVNSGRILLANNSILASSDGLVGISVDGSSTGENDASGEIKIDAAYSTGMLSSGGDITNAGKIDLEKKESIGIYATNANVTNNGATTKGIFIKDEKSVGIYSKINSSSTADKIVTNSGTIDIGGTSKTGSAGIYSIVENGATKRLSTVSSGNITISQKESVGIYAKNKSSQANIESVVTNSGNGKIEVKNEGSAGILVEKSKVTNTAVGTNGIIVSAKKSAGIIGKLGSEIINSGIIKTETATPTAAADGVVGISLNASKATNDSNGTITLDTNYSTGMFGENSSTAINEGNITGTNKENIVGMAGKATTVTNKKTITLSAKKSTGIFGEDNSTLLNDTNGNITVKEESSVGIYSKGNNKIAENKGIILAEKKKSAGMLGSEGKLENSNSITTQDEESAGMYVENSSATNKKTITANGKKSAGVYVKLDKAAGGTIAGTNEGTNATITMTNEGSAAMLGEVKSLVTNNSATLTLTNQNSIVVNTKETVGMMITNDTTGIPNSNVKALNTGTIDLNSGATNKDNIGILANKRATGINEKNINVNSKSSVGMLAKEGSNIENNTTFSTINLKAESGIGMLADGKDASGNISTALNNARIVATSIGKRSLGMLAQNNGKVGNNKNIDILAENGVGIFVSETGVGENTSTGTISLENKESVGIFAKNNGTNDTAKNSGTINLGKADGSTSHESLIGMFAQAESGKTASVKNTKDININTKKSVGMYAKNDASNITDVDLENTGDININSQESAGIYAPKSNISKVGTITLKNSTVSNGSSAVYVSNGGKVADTASAKINLGKVNQNRVAYYVNGKDSALAGANIGKITGYGVGVYLQGASGDKATLDSNTSKLDYTAQGTGNGIIGLLLKGETDIQSYIKGIKVGNTVPRSNPSDKDKYAIGGGGSPPEDPPDSKNTLVLFGAGFGAVITVVVIVVIIKCFCKHRSCFRRNEASRETNNSLTFGPEEALAEQTVFLGGGSAWSHPQFEK

SEQ ID NO: 76 - protein, 2519 aa, Fusobacterium nucleatum
METDTLLLWVLLLWVPGSTGDEVNTEQMKVVPTREEIVSSKENLKNSVGGLQTKINDARSENEKALKGLRLELIQLMEQGNQVVKSPWSSWQFGMNYFYDHWGSEYKGRGDKPQKYLFNGIYTRGNWKVRNAMDVAENQRVGGRPLTPGNDSLNSWKNANNSSNSGVKIDRDNSISSSTNGNRSWGLVDLENLREPTNEVEILARISPKEVTKQAISLNITEPTVQTLEAPDVNPQVNEPLPAPVIDLPEVETVTINPLTINAPDAPTAPSAPTINIGITAPSAPSAPTINVVPTSPSTPSAPTINIGIQPPSITPLSITTPDSVDAPNVVSPQIKPVDFTVDPGGDSNAYSSEKHNSHQGWKASWSKTINVTELTNRNYVSLTRDTADSTIPTDQVINVTKENNRAMVVDEVRKNGIVVDFKGTINLQRSQNVGIDLQGTHQGSKSDPLIANIYNSGKIIGNAKYGSTANKEQIAFGFNNADGSNNTTMTNMVNKGEITLNAPSSAGIQLKPEDPHDWQPNSWNAAPLQIDNKTPNKIKGRVLMKADNQKDINLNGSGSFGMVTVFNEGVPKRLFAPSYVTNYENLRSERTYDGERVLPGGEIGRSALSDSKYTSGVYNTGNININGDSSIGVGLLQEIQEVKLAGNINIGTKAVTQETGISNLPNAGSKTYSINKVEEAVGVFAGVPTMPVKPGETDTLINGSGARNTATSLVGTETVEINGNISLGEHATQSIGALVGDTEVDLNKGQLTENGVNKGSNADRKLKRSGDITAKSNSIINVGGKKNYGFVVSNSAHSSKFGTTVDSLEYKVDKTHHGKGINEGKINVTGDESVGFAMIKGGDSKSSGIISVGNNAENSIGFYGKEDSFTNSGTIEVTSAKKKNKAVVLDGTNASNKINFTNTGNIYVNTSDNGNKNLDGDGNIGIYAQGNYKIEHNSGIVKAGKDAIAFYVKNSTGEVNINAPIELANSNKATTIGIYSDGDAKVKFGASSSLKIGEKAVGLYSADPTKFNNTFEIETGKTLNVELGKNSTFGLLNGNKNVTNSPLLSKYLNNNTTDKINITKFDEGASLFYATLKAKAILDEDYKVTNADAASTSVLVANDGANVEIASGKKLETNTNVGLVATKGAGASLSTSVAENKGTLISTRTDKGIGIYTYTANGENSGTIIMKNQNSVGILGSGGSNLKNTGKIELEAISSAGVYAENSNMINSGTASEIVVKKKASVGIYARETSISSVPKNVKNEGKIEIKADGDGKSAGIYSKKEGGAKLTIENTGNIEVAQKASAGIYAKNESNQANTESVVTNSGLIKMSAENSIGIMGEKSKVENSGTGTKGIEIAGKKSAGILVTKESEVVNSGRILLANNSILASSDGLVGISVDGSSTGENDASGEIKIDAAYSTGMLSSGGDITNAGKIDLEKKESIGIYATNANVTNNGATTKGIFIKDEKSVGIYSKINSSSTADKIVTNSGTIDIGGTSKTGSAGIYSIVENGATKRLSTVSSGNITISQKESVGIYAKNKSSQANIESVVTNSGNGKIEVKNEGSAGILVEKSKVTNTAVGTNGIIVSAKKSAGIIGKLGSEIINSGIIKTETATPTAAADGVVGISLNASKATNDSNGTITLDTNYSTGMFGENSSTAINEGNITGTNKENIVGMAGKATTVTNKKTITLSAKKSTGIFGEDNSTLLNDTNGNITVKEESSVGIYSKGNNKIAENKGIILAEKKKSAGMLGSEGKLENSNSITTQDEESAGMYVENSSATNKKTITANGKKSAGVYVKLDKAAGGTIAGTNEGTNATITMTNEGSAAMLGEVKSLVTNNSATLTLTNQNSIVVNTKETVGMMITNDTTGIPNSNVKALNTGTIDLNSGATNKDNIGILANKRATGINEKNINVNSKSSVGMLAKEGSNIENNTTFSTINLKAESGIGMLADGKDASGNISTALNNARIVATSIGKRSLGMLAQNNGKVGNNKNIDILAENGVGIFVSETGVGENTSTGTISLENKESVGIFAKNNGTNDTAKNSGTINLGKADGSTSHESLIGMFAQAESGKTASVKNTKDININTKKSVGMYAKNDASNITDVDLENTGDININSQESAGIYAPKSNISKVGTITLKNSTVSNGSSAVYVSNGGKVADTASAKINLGKVNQNRVAYYVNGKDSALAGANIGKITGYGVGVYLQGASGDKATLDSNTSKLDYTAQGTGNGIIGLLLKGETDIQSYIKGIKVGNTVPRSNPSDKDKYAIGGGGSGGGSGGGSPAAAEEKAAPAAAKPATTEGEFPETREKMSGIRRAIAKAMVHSKHTAPHVTLMDEADVTKLVAHRKKFKAIAAEKGIKLTFLPYVVKALVSALREYPVLNTSIDDETEEIIQKHYYNIGIAADTDRGLLVPVIKHADRKPIFALAQEINELAEKARDGKLTPGEMKGASCTITNIGSAGGQWFTPVINHPEVAILGIGRIAEKPIVRDGEIVAAPMLALSLSFDHRMIDGATAQKALNHIKRLLSDPELLLMEA

SEQ ID NO: 77 - protein, 2438 aa, Fusobacterium nucleatum
METDTLLLWVLLLWVPGSTGDEVNTEQMKVVPTREEIVSSKENLKNSVGGLQTKINDARSENEKALKGLRLELIQLMEQGNQVVKSPWSSWQFGMNYFYDHWGSEYKGRGDKPQKYLFNGIYTRGNWKVRNAMDVAENQRVGGRPLTPGNDSLNSWKNANNSSNSGVKIDRDNSISSSTNGNRSWGLVDLENLREPTNEVEILARISPKEVTKQAISLNITEPTVQTLEAPDVNPQVNEPLPAPVIDLPEVETVTINPLTINAPDAPTAPSAPTINIGITAPSAPSAPTINVVPTSPSTPSAPTINIGIQPPSITPLSITTPDSVDAPNVVSPQIKPVDFTVDPGGDSNAYSSEKHNSHQGWKASWSKTINVTELTNRNYVSLTRDTADSTIPTDQVINVTKENNRAMVVDEVRKNGIVVDFKGTINLQRSQNVGIDLQGTHQGSKSDPLIANIYNSGKIIGNAKYGSTANKEQIAFGFNNADGSNNTTMTNMVNKGEITLNAPSSAGIQLKPEDPHDWQPNSWNAAPLQIDNKTPNKIKGRVLMKADNQKDINLNGSGSFGMVTVFNEGVPKRLFAPSYVTNYENLRSERTYDGERVLPGGEIGRSALSDSKYTSGVYNTGNININGDSSIGVGLLQEIQEVKLAGNINIGTKAVTQETGISNLPNAGSKTYSINKVEEAVGVFAGVPTMPVKPGETDTLINGSGARNTATSLVGTETVEINGNISLGEHATQSIGALVGDTEVDLNKGQLTENGVNKGSNADRKLKRSGDITAKSNSIINVGGKKNYGFVVSNSAHSSKFGTTVDSLEYKVDKTHHGKGINEGKINVTGDESVGFAMIKGGDSKSSGIISVGNNAENSIGFYGKEDSFTNSGTIEVTSAKKKNKAVVLDGTNASNKINFTNTGNIYVNTSDNGNKNLDGDGNIGIYAQGNYKIEHNSGIVKAGKDAIAFYVKNSTGEVNINAPIELANSNKATTIGIYSDGDAKVKFGASSSLKIGEKAVGLYSADPTKFNNTFEIETGKTLNVELGKNSTFGLLNGNKNVTNSPLLSKYLNNNTTDKINITKFDEGASLFYATLKAKAILDEDYKVTNADAASTSVLVANDGANVEIASGKKLETNTNVGLVATKGAGASLSTSVAENKGTLISTRTDKGIGIYTYTANGENSGTIIMKNQNSVGILGSGGSNLKNTGKIELEAISSAGVYAENSNMINSGTASEIVVKKKASVGIYARETSISSVPKNVKNEGKIEIKADGDGKSAGIYSKKEGGAKLTIENTGNIEVAQKASAGIYAKNESNQANTESVVTNSGLIKMSAENSIGIMGEKSKVENSGTGTKGIEIAGKKSAGILVTKESEVVNSGRILLANNSILASSDGLVGISVDGSSTGENDASGEIKIDAAYSTGMLSSGGDITNAGKIDLEKKESIGIYATNANVTNNGATTKGIFIKDEKSVGIYSKINSSSTADKIVTNSGTIDIGGTSKTGSAGIYSIVENGATKRLSTVSSGNITISQKESVGIYAKNKSSQANIESVVTNSGNGKIEVKNEGSAGILVEKSKVTNTAVGTNGIIVSAKKSAGIIGKLGSEIINSGIIKTETATPTAAADGVVGISLNASKATNDSNGTITLDTNYSTGMFGENSSTAINEGNITGTNKENIVGMAGKATTVTNKKTITLSAKKSTGIFGEDNSTLLNDTNGNITVKEESSVGIYSKGNNKIAENKGIILAEKKKSAGMLGSEGKLENSNSITTQDEESAGMYVENSSATNKKTITANGKKSAGVYVKLDKAAGGTIAGTNEGTNATITMTNEGSAAMLGEVKSLVTNNSATLTLTNQNSIVVNTKETVGMMITNDTTGIPNSNVKALNTGTIDLNSGATNKDNIGILANKRATGINEKNINVNSKSSVGMLAKEGSNIENNTTFSTINLKAESGIGMLADGKDASGNISTALNNARIVATSIGKRSLGMLAQNNGKVGNNKNIDILAENGVGIFVSETGVGENTSTGTISLENKESVGIFAKNNGTNDTAKNSGTINLGKADGSTSHESLIGMFAQAESGKTASVKNTKDININTKKSVGMYAKNDASNITDVDLENTGDININSQESAGIYAPKSNISKVGTITLKNSTVSNGSSAVYVSNGGKVADTASAKINLGKVNQNRVAYYVNGKDSALAGANIGKITGYGVGVYLQGASGDKATLDSNTSKLDYTAQGTGNGIIGLLLKGETDIQSYIKGIKVGNTVPRSNPSDKDKYAIGGGGSGGGSGGGSESQVRQQFSKDIIKLLNEQVNKEMNSSNLYMSMSSWCYTHSLDGAGLFLFDHAAEEYEHAKKLIIFLNENNVPVQLTSISAPEHKFEGLTQIFQKAYEHEQHISESINNIVDHAIKSKDHATFNFLQWYVAEQHEEEVLFKDILDKIELIGNENHGLYLADQYVKGIAKSRKS

SEQ ID NO: 78 - protein, 2292 aa, Fusobacterium nucleatum
METDTLLLWVLLLWVPGSTGDEVNTEQMKVVPTREEIVSSKENLKNSVGGLQTKINDARSENEKALKGLRLELIQLMEQGNQVVKSPWSSWQFGMNYFYDHWGSEYKGRGDKPQKYLFNGIYTRGNWKVRNAMDVAENQRVGGRPLTPGNDSLNSWKNANNSSNSGVKIDRDNSISSSTNGNRSWGLVDLENLREPTNEVEILARISPKEVTKQAISLNITEPTVQTLEAPDVNPQVNEPLPAPVIDLPEVETVTINPLTINAPDAPTAPSAPTINIGITAPSAPSAPTINVVPTSPSTPSAPTINIGIQPPSITPLSITTPDSVDAPNVVSPQIKPVDFTVDPGGDSNAYSSEKHNSHQGWKASWSKTINVTELTNRNYVSLTRDTADSTIPTDQVINVTKENNRAMVVDEVRKNGIVVDFKGTINLQRSQNVGIDLQGTHQGSKSDPLIANIYNSGKIIGNAKYGSTANKEQIAFGFNNADGSNNTTMTNMVNKGEITLNAPSSAGIQLKPEDPHDWQPNSWNAAPLQIDNKTPNKIKGRVLMKADNQKDINLNGSGSFGMVTVFNEGVPKRLFAPSYVTNYENLRSERTYDGERVLPGGEIGRSALSDSKYTSGVYNTGNININGDSSIGVGLLQEIQEVKLAGNINIGTKAVTQETGISNLPNAGSKTYSINKVEEAVGVFAGVPTMPVKPGETDTLINGSGARNTATSLVGTETVEINGNISLGEHATQSIGALVGDTEVDLNKGQLTENGVNKGSNADRKLKRSGDITAKSNSIINVGGKKNYGFVVSNSAHSSKFGTTVDSLEYKVDKTHHGKGINEGKINVTGDESVGFAMIKGGDSKSSGIISVGNNAENSIGFYGKEDSFTNSGTIEVTSAKKKNKAVVLDGTNASNKINFTNTGNIYVNTSDNGNKNLDGDGNIGIYAQGNYKIEHNSGIVKAGKDAIAFYVKNSTGEVNINAPIELANSNKATTIGIYSDGDAKVKFGASSSLKIGEKAVGLYSADPTKFNNTFEIETGKTLNVELGKNSTFGLLNGNKNVTNSPLLSKYLNNNTTDKINITKFDEGASLFYATLKAKAILDEDYKVTNADAASTSVLVANDGANVEIASGKKLETNTNVGLVATKGAGASLSTSVAENKGTLISTRTDKGIGIYTYTANGENSGTIIMKNQNSVGILGSGGSNLKNTGKIELEAISSAGVYAENSNMINSGTASEIVVKKKASVGIYARETSISSVPKNVKNEGKIEIKADGDGKSAGIYSKKEGGAKLTIENTGNIEVAQKASAGIYAKNESNQANTESVVTNSGLIKMSAENSIGIMGEKSKVENSGTGTKGIEIAGKKSAGILVTKESEVVNSGRILLANNSILASSDGLVGISVDGSSTGENDASGEIKIDAAYSTGMLSSGGDITNAGKIDLEKKESIGIYATNANVTNNGATTKGIFIKDEKSVGIYSKINSSSTADKIVTNSGTIDIGGTSKTGSAGIYSIVENGATKRLSTVSSGNITISQKESVGIYAKNKSSQANIESVVTNSGNGKIEVKNEGSAGILVEKSKVTNTAVGTNGIIVSAKKSAGIIGKLGSEIINSGIIKTETATPTAAADGVVGISLNASKATNDSNGTITLDTNYSTGMFGENSSTAINEGNITGTNKENIVGMAGKATTVTNKKTITLSAKKSTGIFGEDNSTLLNDTNGNITVKEESSVGIYSKGNNKIAENKGIILAEKKKSAGMLGSEGKLENSNSITTQDEESAGMYVENSSATNKKTITANGKKSAGVYVKLDKAAGGTIAGTNEGTNATITMTNEGSAAMLGEVKSLVTNNSATLTLTNQNSIVVNTKETVGMMITNDTTGIPNSNVKALNTGTIDLNSGATNKDNIGILANKRATGINEKNINVNSKSSVGMLAKEGSNIENNTTFSTINLKAESGIGMLADGKDASGNISTALNNARIVATSIGKRSLGMLAQNNGKVGNNKNIDILAENGVGIFVSETGVGENTSTGTISLENKESVGIFAKNNGTNDTAKNSGTINLGKADGSTSHESLIGMFAQAESGKTASVKNTKDININTKKSVGMYAKNDASNITDVDLENTGDININSQESAGIYAPKSNISKVGTITLKNSTVSNGSSAVYVSNGGKVADTASAKINLGKVNQNRVAYYVNGKDSALAGANIGKITGYGVGVYLQGASGDKATLDSNTSKLDYTAQGTGNGIIGLLLKGETDIQSYIKGIKVGNTVPRSNPSDKDKYAIGGGGSGGGSGGGSGYIPEAPRDGQAYVRKDGEWVLLSTFL

SEQ ID NO: 79 - protein, 2470 aa, Fusobacterium nucleatum
METDTLLLWVLLLWVPGSTGDEVNTEQMKVVPTREEIVSSKENLKNSVGGLQTKINDARSENEKALKGLRLELIQLMEQGNQVVKSPWSSWQFGMNYFYDHWGSEYKGRGDKPQKYLFNGIYTRGNWKVRNAMDVAENQRVGGRPLTPGNDSLNSWKNANNSSNSGVKIDRDNSISSSTNGNRSWGLVDLENLREPTNEVEILARISPKEVTKQAISLNITEPTVQTLEAPDVNPQVNEPLPAPVIDLPEVETVTINPLTINAPDAPTAPSAPTINIGITAPSAPSAPTINVVPTSPSTPSAPTINIGIQPPSITPLSITTPDSVDAPNVVSPQIKPVDFTVDPGGDSNAYSSEKHNSHQGWKASWSKTINVTELTNRNYVSLTRDTADSTIPTDQVINVTKENNRAMVVDEVRKNGIVVDFKGTINLQRSQNVGIDLQGTHQGSKSDPLIANIYNSGKIIGNAKYGSTANKEQIAFGFNNADGSNNTTMTNMVNKGEITLNAPSSAGIQLKPEDPHDWQPNSWNAAPLQIDNKTPNKIKGRVLMKADNQKDINLNGSGSFGMVTVFNEGVPKRLFAPSYVTNYENLRSERTYDGERVLPGGEIGRSALSDSKYTSGVYNTGNININGDSSIGVGLLQEIQEVKLAGNINIGTKAVTQETGISNLPNAGSKTYSINKVEEAVGVFAGVPTMPVKPGETDTLINGSGARNTATSLVGTETVEINGNISLGEHATQSIGALVGDTEVDLNKGQLTENGVNKGSNADRKLKRSGDITAKSNSIINVGGKKNYGFVVSNSAHSSKFGTTVDSLEYKVDKTHHGKGINEGKINVTGDESVGFAMIKGGDSKSSGIISVGNNAENSIGFYGKEDSFTNSGTIEVTSAKKKNKAVVLDGTNASNKINFTNTGNIYVNTSDNGNKNLDGDGNIGIYAQGNYKIEHNSGIVKAGKDAIAFYVKNSTGEVNINAPIELANSNKATTIGIYSDGDAKVKFGASSSLKIGEKAVGLYSADPTKFNNTFEIETGKTLNVELGKNSTFGLLNGNKNVTNSPLLSKYLNNNTTDKINITKFDEGASLFYATLKAKAILDEDYKVTNADAASTSVLVANDGANVEIASGKKLETNTNVGLVATKGAGASLSTSVAENKGTLISTRTDKGIGIYTYTANGENSGTIIMKNQNSVGILGSGGSNLKNTGKIELEAISSAGVYAENSNMINSGTASEIVVKKKASVGIYARETSISSVPKNVKNEGKIEIKADGDGKSAGIYSKKEGGAKLTIENTGNIEVAQKASAGIYAKNESNQANTESVVTNSGLIKMSAENSIGIMGEKSKVENSGTGTKGIEIAGKKSAGILVTKESEVVNSGRILLANNSILASSDGLVGISVDGSSTGENDASGEIKIDAAYSTGMLSSGGDITNAGKIDLEKKESIGIYATNANVTNNGATTKGIFIKDEKSVGIYSKINSSSTADKIVTNSGTIDIGGTSKTGSAGIYSIVENGATKRLSTVSSGNITISQKESVGIYAKNKSSQANIESVVTNSGNGKIEVKNEGSAGILVEKSKVTNTAVGTNGIIVSAKKSAGIIGKLGSEIINSGIIKTETATPTAAADGVVGISLNASKATNDSNGTITLDTNYSTGMFGENSSTAINEGNITGTNKENIVGMAGKATTVTNKKTITLSAKKSTGIFGEDNSTLLNDTNGNITVKEESSVGIYSKGNNKIAENKGIILAEKKKSAGMLGSEGKLENSNSITTQDEESAGMYVENSSATNKKTITANGKKSAGVYVKLDKAAGGTIAGTNEGTNATITMTNEGSAAMLGEVKSLVTNNSATLTLTNQNSIVVNTKETVGMMITNDTTGIPNSNVKALNTGTIDLNSGATNKDNIGILANKRATGINEKNINVNSKSSVGMLAKEGSNIENNTTFSTINLKAESGIGMLADGKDASGNISTALNNARIVATSIGKRSLGMLAQNNGKVGNNKNIDILAENGVGIFVSETGVGENTSTGTISLENKESVGIFAKNNGTNDTAKNSGTINLGKADGSTSHESLIGMFAQAESGKTASVKNTKDININTKKSVGMYAKNDASNITDVDLENTGDININSQESAGIYAPKSNISKVGTITLKNSTVSNGSSAVYVSNGGKVADTASAKINLGKVNQNRVAYYVNGKDSALAGANIGKITGYGVGVYLQGASGDKATLDSNTSKLDYTAQGTGNGIIGLLLKGETDIQSYIKGIKVGNTVPRSNPSDKDKYAIGGGGSGGGSGGGSMKMEELFKKHKIVAVLRANSVEEAKKKALAVFLGGVHLIEITFTVPDADTVIKELSFLKEMGAIIGAGTVTSVEQARKAVESGAEFIVSPHLDEEISQFAKEKGVFYMPGVMTPTELVKAMKLGHTILKLFPGEVVGPQFVKAMKGPFPNVKFVPTGGVNLDNVCEWFKAGVLAVGVGSALVKGTPVEVAEKAKAFVEKIRGCTE

SEQ ID NO: 80 - protein, 2319 aa, Fusobacterium nucleatum
METDTLLLWVLLLWVPGSTGDEVNTEQMKVVPTREEIVSSKENLKNSVGGLQTKINDARSENEKALKGLRLELIQLMEQGNQVVKSPWSSWQFGMNYFYDHWGSEYKGRGDKPQKYLFNGIYTRGNWKVRNAMDVAENQRVGGRPLTPGNDSLNSWKNANNSSNSGVKIDRDNSISSSTNGNRSWGLVDLENLREPTNEVEILARISPKEVTKQAISLNITEPTVQTLEAPDVNPQVNEPLPAPVIDLPEVETVTINPLTINAPDAPTAPSAPTINIGITAPSAPSAPTINVVPTSPSTPSAPTINIGIQPPSITPLSITTPDSVDAPNVVSPQIKPVDFTVDPGGDSNAYSSEKHNSHQGWKASWSKTINVTELTNRNYVSLTRDTADSTIPTDQVINVTKENNRAMVVDEVRKNGIVVDFKGTINLQRSQNVGIDLQGTHQGSKSDPLIANIYNSGKIIGNAKYGSTANKEQIAFGFNNADGSNNTTMTNMVNKGEITLNAPSSAGIQLKPEDPHDWQPNSWNAAPLQIDNKTPNKIKGRVLMKADNQKDINLNGSGSFGMVTVFNEGVPKRLFAPSYVTNYENLRSERTYDGERVLPGGEIGRSALSDSKYTSGVYNTGNININGDSSIGVGLLQEIQEVKLAGNINIGTKAVTQETGISNLPNAGSKTYSINKVEEAVGVFAGVPTMPVKPGETDTLINGSGARNTATSLVGTETVEINGNISLGEHATQSIGALVGDTEVDLNKGQLTENGVNKGSNADRKLKRSGDITAKSNSIINVGGKKNYGFVVSNSAHSSKFGTTVDSLEYKVDKTHHGKGINEGKINVTGDESVGFAMIKGGDSKSSGIISVGNNAENSIGFYGKEDSFTNSGTIEVTSAKKKNKAVVLDGTNASNKINFTNTGNIYVNTSDNGNKNLDGDGNIGIYAQGNYKIEHNSGIVKAGKDAIAFYVKNSTGEVNINAPIELANSNKATTIGIYSDGDAKVKFGASSSLKIGEKAVGLYSADPTKFNNTFEIETGKTLNVELGKNSTFGLLNGNKNVTNSPLLSKYLNNNTTDKINITKFDEGASLFYATLKAKAILDEDYKVTNADAASTSVLVANDGANVEIASGKKLETNTNVGLVATKGAGASLSTSVAENKGTLISTRTDKGIGIYTYTANGENSGTIIMKNQNSVGILGSGGSNLKNTGKIELEAISSAGVYAENSNMINSGTASEIVVKKKASVGIYARETSISSVPKNVKNEGKIEIKADGDGKSAGIYSKKEGGAKLTIENTGNIEVAQKASAGIYAKNESNQANTESVVTNSGLIKMSAENSIGIMGEKSKVENSGTGTKGIEIAGKKSAGILVTKESEVVNSGRILLANNSILASSDGLVGISVDGSSTGENDASGEIKIDAAYSTGMLSSGGDITNAGKIDLEKKESIGIYATNANVTNNGATTKGIFIKDEKSVGIYSKINSSSTADKIVTNSGTIDIGGTSKTGSAGIYSIVENGATKRLSTVSSGNITISQKESVGIYAKNKSSQANIESVVTNSGNGKIEVKNEGSAGILVEKSKVTNTAVGTNGIIVSAKKSAGIIGKLGSEIINSGIIKTETATPTAAADGVVGISLNASKATNDSNGTITLDTNYSTGMFGENSSTAINEGNITGTNKENIVGMAGKATTVTNKKTITLSAKKSTGIFGEDNSTLLNDTNGNITVKEESSVGIYSKGNNKIAENKGIILAEKKKSAGMLGSEGKLENSNSITTQDEESAGMYVENSSATNKKTITANGKKSAGVYVKLDKAAGGTIAGTNEGTNATITMTNEGSAAMLGEVKSLVTNNSATLTLTNQNSIVVNTKETVGMMITNDTTGIPNSNVKALNTGTIDLNSGATNKDNIGILANKRATGINEKNINVNSKSSVGMLAKEGSNIENNTTFSTINLKAESGIGMLADGKDASGNISTALNNARIVATSIGKRSLGMLAQNNGKVGNNKNIDILAENGVGIFVSETGVGENTSTGTISLENKESVGIFAKNNGTNDTAKNSGTINLGKADGSTSHESLIGMFAQAESGKTASVKNTKDININTKKSVGMYAKNDASNITDVDLENTGDININSQESAGIYAPKSNISKVGTITLKNSTVSNGSSAVYVSNGGKVADTASAKINLGKVNQNRVAYYVNGKDSALAGANIGKITGYGVGVYLQGASGDKATLDSNTSKLDYTAQGTGNGIIGLLLKGETDIQSYIKGIKVGNTVPRSNPSDKDKYAIGGGGSAVGQDTQEVIVVPHSLPFKVVVISAILALVVLTIISLIILIMLWQKKPRGGGSAWSHPQFEK

SEQ ID NO: 81 - DNA, 2235 bp, Fusobacterium nucleatum
  source 1..2235: mol_type = other DNA
atggaaacagacacattgctgctatgggtcctgctgctctgggttccaggctccactggtgacgaatctagcgagaagcacaacagccaccagggctggaaggccagctggtccaagaccatcaacgtgacagagctgaccaaccggaactacgtgtccctgacaagagacaccgctgactcgaccatcccaacagaccaggtgataaacgtgaccaaagagaacaacagagccatggtggttgacgaggtgagaaagaacgggatcgtagtggacttcaagggcaccatcaacctgcagagaagccagaacgtgggcatcgacctgcaaggtacacaccagggcagcaagagcgacccactgatcgccaacatctacaactccggaaagatcatcggcaacgccaaatacggaagcacggccaacaaggagcagatcgccttcggattcaacaacgccgacggctccaacaacacgaccatgaccaacatggtgaacaaaggagagataacactgaacgcgccttcctccgccggtatccaactgaagcctgaagacccccacgactggcagcctaactcttggaacgccgcgccactgcaaatcgacaacaagacgcccaacaaaatcaagggcagagtgctgatgaaggctgacaaccagaaagacataaacctgaacggctcaggcagcttcggcatggtcaccgtgttcaacgagggcgtacccaagagactgttcgcacccagctacgtaacaaactacgagaacttgcggtccgagcggacatacgacggcgagagagtgctgccaggcggcgagatcggccggagcgctctgtctgactctaaatacacatccggcgtgtacaacaccggcaacatcaacatcaacggtgacagctctatcggcgtgggcctgctgcaggagatacaggaggtgaagctcgccgggaacatcaacataggcaccaaggctgttacacaggagactggcatcagcaacctgcccaacgccgggtcgaaaacctacagcatcaacaaggtcgaagaggccgtgggagtgttcgccggcgtccctacgatgcctgtgaagcctggcgagacagacaccctgatcaacggctctggcgcaagaaacacagccacttccttggtgggcaccgagacagtggagatcaacggaaacatcagcctcggcgagcacgcgacccagtcaatcggcgccctggtgggcgacacggaagtggacctcaacaagggtcagctgaccgagaacggcgtaaacaaaggctctaacgccgacagaaagctgaagagaagcggggacatcacagcaaagagcaacagcatcatcaacgtgggcggaaaaaagaactacggattcgtggtgtctaactcagcccacagcagcaagttcggcacaaccgtggacagcctcgagtacaaggtggacaaaacccaccacggaaaaggcatcaacgaaggcaaaatcaacgtaacgggcgacgagtccgttggtttcgccatgatcaagggaggcgacagcaagagcagcggcatcatctctgtaggcaacaacgcggagaactccatcggcttctacggcaaggaggactccttcaccaacagcgggacaatagaggtgacgagcgcaaagaagaagaacaaggccgtagtgctggacgggacaaacgcttctaacaagatcaacttcaccaacaccggtaacatatacgtcaacactagcgacaacggaaacaagaacttggacggggacggcaacatcggtatctacgcccaaggtaactacaaaatcgagcacaacagcggcatcgtcaaggccggaaaggacgccatcgccttctacgtgaaaaactcaacaggagaagtgaacatcaacgcccctatcgagctggctaacagcaacaaggcaactactatcgggatctacagcgacggcgacgccaaggtaaaattcggggccagctcctcacttaagatcggggaaaaggctgtggggctctacagcgccgaccccacaaagttcaacaacacattcgaaatcgaaaccggcaagacactgaacgtggagctaggtaagaacagcacattcggccttctgaacggcaacaaaaacgttactaactccccactgctgtcaaagtacctgaacaacaacaccacggacggcggaggctctgcctggtcccacccccaattcgagaagtgatga

SEQ ID NO: 82 - DNA, 2625 bp, Fusobacterium nucleatum
  source 1..2625: mol_type = other DNA
atggaaacagacacattgctgctatgggtcctgctgctctgggttccaggctccactggtgacgaatctagcgagaagcacaacagccaccagggctggaaggccagctggtccaagaccatcaacgtgacagagctgaccaaccggaactacgtgtccctgacaagagacaccgctgactcgaccatcccaacagaccaggtgataaacgtgaccaaagagaacaacagagccatggtggttgacgaggtgagaaagaacgggatcgtagtggacttcaagggcaccatcaacctgcagagaagccagaacgtgggcatcgacctgcaaggtacacaccagggcagcaagagcgacccactgatcgccaacatctacaactccggaaagatcatcggcaacgccaaatacggaagcacggccaacaaggagcagatcgccttcggattcaacaacgccgacggctccaacaacacgaccatgaccaacatggtgaacaaaggagagataacactgaacgcgccttcctccgccggtatccaactgaagcctgaagacccccacgactggcagcctaactcttggaacgccgcgccactgcaaatcgacaacaagacgcccaacaaaatcaagggcagagtgctgatgaaggctgacaaccagaaagacataaacctgaacggctcaggcagcttcggcatggtcaccgtgttcaacgagggcgtacccaagagactgttcgcacccagctacgtaacaaactacgagaacttgcggtccgagcggacatacgacggcgagagagtgctgccaggcggcgagatcggccggagcgctctgtctgactctaaatacacatccggcgtgtacaacaccggcaacatcaacatcaacggtgacagctctatcggcgtgggcctgctgcaggagatacaggaggtgaagctcgccgggaacatcaacataggcaccaaggctgttacacaggagactggcatcagcaacctgcccaacgccgggtcgaaaacctacagcatcaacaaggtcgaagaggccgtgggagtgttcgccggcgtccctacgatgcctgtgaagcctggcgagacagacaccctgatcaacggctctggcgcaagaaacacagccacttccttggtgggcaccgagacagtggagatcaacggaaacatcagcctcggcgagcacgcgacccagtcaatcggcgccctggtgggcgacacggaagtggacctcaacaagggtcagctgaccgagaacggcgtaaacaaaggctctaacgccgacagaaagctgaagagaagcggggacatcacagcaaagagcaacagcatcatcaacgtgggcggaaaaaagaactacggattcgtggtgtctaactcagcccacagcagcaagttcggcacaaccgtggacagcctcgagtacaaggtggacaaaacccaccacggaaaaggcatcaacgaaggcaaaatcaacgtaacgggcgacgagtccgttggtttcgccatgatcaagggaggcgacagcaagagcagcggcatcatctctgtaggcaacaacgcggagaactccatcggcttctacggcaaggaggactccttcaccaacagcgggacaatagaggtgacgagcgcaaagaagaagaacaaggccgtagtgctggacgggacaaacgcttctaacaagatcaacttcaccaacaccggtaacatatacgtcaacactagcgacaacggaaacaagaacttggacggggacggcaacatcggtatctacgcccaaggtaactacaaaatcgagcacaacagcggcatcgtcaaggccggaaaggacgccatcgccttctacgtgaaaaactcaacaggagaagtgaacatcaacgcccctatcgagctggctaacagcaacaaggcaactactatcgggatctacagcgacggcgacgccaaggtaaaattcggggccagctcctcacttaagatcggggaaaaggctgtggggctctacagcgccgaccccacaaagttcaacaacacattcgaaatcgaaaccggcaagacactgaacgtggagctaggtaagaacagcacattcggccttctgaacggcaacaaaaacgttactaactccccactgctgtcaaagtacctgaacaacaacaccacggacggcggaggctctggaggagggtccggagggggctcaatggccaacaaacctatgcagccaatcaccagcaccgcaaacaagatcgtgtggtccgaccctacaagactgagcaccaccttcagcgctagcctgctgagacaaagagtgaaagtgggcatcgccgagctgaacaacgtgtctggacagtacgtgtccgtgtacaagcggcccgcccctaagcctgagggctgcgccgacgcctgcgtgatcatgcctaacgagaaccagagcatccggaccgtgatcagcggcagcgctgaaaacctggccacactcaaggccgaatgggagacacacaagagaaacgtcgacaccctgttcgccagcggcaacgccggcctgggcttcctggaccccaccgccgctatcgtgtcttctgacaccacagcctgatga

SEQ ID NO: 83 - DNA, 2457 bp, Fusobacterium nucleatum
  source 1..2457: mol_type = other DNA
atggaaacagacacattgctgctatgggtcctgctgctctgggttccaggctccactggtgacgaatctagcgagaagcacaacagccaccagggctggaaggccagctggtccaagaccatcaacgtgacagagctgaccaaccggaactacgtgtccctgacaagagacaccgctgactcgaccatcccaacagaccaggtgataaacgtgaccaaagagaacaacagagccatggtggttgacgaggtgagaaagaacgggatcgtagtggacttcaagggcaccatcaacctgcagagaagccagaacgtgggcatcgacctgcaaggtacacaccagggcagcaagagcgacccactgatcgccaacatctacaactccggaaagatcatcggcaacgccaaatacggaagcacggccaacaaggagcagatcgccttcggattcaacaacgccgacggctccaacaacacgaccatgaccaacatggtgaacaaaggagagataacactgaacgcgccttcctccgccggtatccaactgaagcctgaagacccccacgactggcagcctaactcttggaacgccgcgccactgcaaatcgacaacaagacgcccaacaaaatcaagggcagagtgctgatgaaggctgacaaccagaaagacataaacctgaacggctcaggcagcttcggcatggtcaccgtgttcaacgagggcgtacccaagagactgttcgcacccagctacgtaacaaactacgagaacttgcggtccgagcggacatacgacggcgagagagtgctgccaggcggcgagatcggccggagcgctctgtctgactctaaatacacatccggcgtgtacaacaccggcaacatcaacatcaacggtgacagctctatcggcgtgggcctgctgcaggagatacaggaggtgaagctcgccgggaacatcaacataggcaccaaggctgttacacaggagactggcatcagcaacctgcccaacgccgggtcgaaaacctacagcatcaacaaggtcgaagaggccgtgggagtgttcgccggcgtccctacgatgcctgtgaagcctggcgagacagacaccctgatcaacggctctggcgcaagaaacacagccacttccttggtgggcaccgagacagtggagatcaacggaaacatcagcctcggcgagcacgcgacccagtcaatcggcgccctggtgggcgacacggaagtggacctcaacaagggtcagctgaccgagaacggcgtaaacaaaggctctaacgccgacagaaagctgaagagaagcggggacatcacagcaaagagcaacagcatcatcaacgtgggcggaaaaaagaactacggattcgtggtgtctaactcagcccacagcagcaagttcggcacaaccgtggacagcctcgagtacaaggtggacaaaacccaccacggaaaaggcatcaacgaaggcaaaatcaacgtaacgggcgacgagtccgttggtttcgccatgatcaagggaggcgacagcaagagcagcggcatcatctctgtaggcaacaacgcggagaactccatcggcttctacggcaaggaggactccttcaccaacagcgggacaatagaggtgacgagcgcaaagaagaagaacaaggccgtagtgctggacgggacaaacgcttctaacaagatcaacttcaccaacaccggtaacatatacgtcaacactagcgacaacggaaacaagaacttggacggggacggcaacatcggtatctacgcccaaggtaactacaaaatcgagcacaacagcggcatcgtcaaggccggaaaggacgccatcgccttctacgtgaaaaactcaacaggagaagtgaacatcaacgcccctatcgagctggctaacagcaacaaggcaactactatcgggatctacagcgacggcgacgccaaggtaaaattcggggccagctcctcacttaagatcggggaaaaggctgtggggctctacagcgccgaccccacaaagttcaacaacacattcgaaatcgaaaccggcaagacactgaacgtggagctaggtaagaacagcacattcggccttctgaacggcaacaaaaacgttactaactccccactgctgtcaaagtacctgaacaacaacaccacggacggcggaggctctcccccagaagaccctcctgatagcaagaacaccctggtgctgttcggcgctggcttcggcgccgtgatcacagtggtggtgatcgtggtcatcatcaagtgcttctgcaagcacagatcttgcttcagacggaacgaggccagcagagagacaaacaacagcctgaccttcggacctgaggaagccctggccgagcagaccgtgttcctgggcggaggctctgcctggtcccacccccaattcgagaagtgatga

SEQ ID NO: 84 - DNA, 2994 bp, Fusobacterium nucleatum
  source 1..2994: mol_type = other DNA
atggaaacagacacattgctgctatgggtcctgctgctctgggttccaggctccactggtgacgaatctagcgagaagcacaacagccaccagggctggaaggccagctggtccaagaccatcaacgtgacagagctgaccaaccggaactacgtgtccctgacaagagacaccgctgactcgaccatcccaacagaccaggtgataaacgtgaccaaagagaacaacagagccatggtggttgacgaggtgagaaagaacgggatcgtagtggacttcaagggcaccatcaacctgcagagaagccagaacgtgggcatcgacctgcaaggtacacaccagggcagcaagagcgacccactgatcgccaacatctacaactccggaaagatcatcggcaacgccaaatacggaagcacggccaacaaggagcagatcgccttcggattcaacaacgccgacggctccaacaacacgaccatgaccaacatggtgaacaaaggagagataacactgaacgcgccttcctccgccggtatccaactgaagcctgaagacccccacgactggcagcctaactcttggaacgccgcgccactgcaaatcgacaacaagacgcccaacaaaatcaagggcagagtgctgatgaaggctgacaaccagaaagacataaacctgaacggctcaggcagcttcggcatggtcaccgtgttcaacgagggcgtacccaagagactgttcgcacccagctacgtaacaaactacgagaacttgcggtccgagcggacatacgacggcgagagagtgctgccaggcggcgagatcggccggagcgctctgtctgactctaaatacacatccggcgtgtacaacaccggcaacatcaacatcaacggtgacagctctatcggcgtgggcctgctgcaggagatacaggaggtgaagctcgccgggaacatcaacataggcaccaaggctgttacacaggagactggcatcagcaacctgcccaacgccgggtcgaaaacctacagcatcaacaaggtcgaagaggccgtgggagtgttcgccggcgtccctacgatgcctgtgaagcctggcgagacagacaccctgatcaacggctctggcgcaagaaacacagccacttccttggtgggcaccgagacagtggagatcaacggaaacatcagcctcggcgagcacgcgacccagtcaatcggcgccctggtgggcgacacggaagtggacctcaacaagggtcagctgaccgagaacggcgtaaacaaaggctctaacgccgacagaaagctgaagagaagcggggacatcacagcaaagagcaacagcatcatcaacgtgggcggaaaaaagaactacggattcgtggtgtctaactcagcccacagcagcaagttcggcacaaccgtggacagcctcgagtacaaggtggacaaaacccaccacggaaaaggcatcaacgaaggcaaaatcaacgtaacgggcgacgagtccgttggtttcgccatgatcaagggaggcgacagcaagagcagcggcatcatctctgtaggcaacaacgcggagaactccatcggcttctacggcaaggaggactccttcaccaacagcgggacaatagaggtgacgagcgcaaagaagaagaacaaggccgtagtgctggacgggacaaacgcttctaacaagatcaacttcaccaacaccggtaacatatacgtcaacactagcgacaacggaaacaagaacttggacggggacggcaacatcggtatctacgcccaaggtaactacaaaatcgagcacaacagcggcatcgtcaaggccggaaaggacgccatcgccttctacgtgaaaaactcaacaggagaagtgaacatcaacgcccctatcgagctggctaacagcaacaaggcaactactatcgggatctacagcgacggcgacgccaaggtaaaattcggggccagctcctcacttaagatcggggaaaaggctgtggggctctacagcgccgaccccacaaagttcaacaacacattcgaaatcgaaaccggcaagacactgaacgtggagctaggtaagaacagcacattcggccttctgaacggcaacaaaaacgttactaactccccactgctgtcaaagtacctgaacaacaacaccacggacggcggaggctctggaggagggtccggagggggctcaccagccgccgccgaagaaaaggccgcccctgccgccgctaaacctgctacaaccgagggcgagttccccgagacacgggagaagatgagcggcatccgcagagccatcgccaaggccatggtgcacagcaaacacaccgcccctcacgttacactgatggacgaggccgacgtgaccaagctggtcgcccaccggaagaagttcaaggccatcgccgccgagaaaggcatcaaactgaccttcctgccttacgtggtgaaggccctggtgtccgccctcagagaataccccgtgctgaacaccagcatcgacgacgaaaccgaggaaatcatccagaagcactactacaacatcggcatcgcggctgacaccgacagaggcctgctggtgccagtgatcaagcacgccgacagaaagcccatcttcgccctggcccaggagatcaatgagctggctgaaaaagccagagacggaaagctgacacctggcgagatgaagggcgcttcttgcaccatcacaaacatcggaagcgccggcggacagtggttcacccctgtgatcaaccaccctgaggtggccatcctgggcatcggcagaatcgccgagaagcctatcgtgcgggacggcgaaatcgtggctgctcctatgctggccctgagcctgtctttcgaccacagaatgatcgacggcgccaccgcccaaaaggcacttaaccacatcaagcggctgctgagcgaccccgagctgctgctgatggaagcctgatga

SEQ ID NO: 85 - DNA, 2751 bp, Fusobacterium nucleatum
  source 1..2751: mol_type = other DNA
atggaaacagacacattgctgctatgggtcctgctgctctgggttccaggctccactggtgacgaatctagcgagaagcacaacagccaccagggctggaaggccagctggtccaagaccatcaacgtgacagagctgaccaaccggaactacgtgtccctgacaagagacaccgctgactcgaccatcccaacagaccaggtgataaacgtgaccaaagagaacaacagagccatggtggttgacgaggtgagaaagaacgggatcgtagtggacttcaagggcaccatcaacctgcagagaagccagaacgtgggcatcgacctgcaaggtacacaccagggcagcaagagcgacccactgatcgccaacatctacaactccggaaagatcatcggcaacgccaaatacggaagcacggccaacaaggagcagatcgccttcggattcaacaacgccgacggctccaacaacacgaccatgaccaacatggtgaacaaaggagagataacactgaacgcgccttcctccgccggtatccaactgaagcctgaagacccccacgactggcagcctaactcttggaacgccgcgccactgcaaatcgacaacaagacgcccaacaaaatcaagggcagagtgctgatgaaggctgacaaccagaaagacataaacctgaacggctcaggcagcttcggcatggtcaccgtgttcaacgagggcgtacccaagagactgttcgcacccagctacgtaacaaactacgagaacttgcggtccgagcggacatacgacggcgagagagtgctgccaggcggcgagatcggccggagcgctctgtctgactctaaatacacatccggcgtgtacaacaccggcaacatcaacatcaacggtgacagctctatcggcgtgggcctgctgcaggagatacaggaggtgaagctcgccgggaacatcaacataggcaccaaggctgttacacaggagactggcatcagcaacctgcccaacgccgggtcgaaaacctacagcatcaacaaggtcgaagaggccgtgggagtgttcgccggcgtccctacgatgcctgtgaagcctggcgagacagacaccctgatcaacggctctggcgcaagaaacacagccacttccttggtgggcaccgagacagtggagatcaacggaaacatcagcctcggcgagcacgcgacccagtcaatcggcgccctggtgggcgacacggaagtggacctcaacaagggtcagctgaccgagaacggcgtaaacaaaggctctaacgccgacagaaagctgaagagaagcggggacatcacagcaaagagcaacagcatcatcaacgtgggcggaaaaaagaactacggattcgtggtgtctaactcagcccacagcagcaagttcggcacaaccgtggacagcctcgagtacaaggtggacaaaacccaccacggaaaaggcatcaacgaaggcaaaatcaacgtaacgggcgacgagtccgttggtttcgccatgatcaagggaggcgacagcaagagcagcggcatcatctctgtaggcaacaacgcggagaactccatcggcttctacggcaaggaggactccttcaccaacagcgggacaatagaggtgacgagcgcaaagaagaagaacaaggccgtagtgctggacgggacaaacgcttctaacaagatcaacttcaccaacaccggtaacatatacgtcaacactagcgacaacggaaacaagaacttggacggggacggcaacatcggtatctacgcccaaggtaactacaaaatcgagcacaacagcggcatcgtcaaggccggaaaggacgccatcgccttctacgtgaaaaactcaacaggagaagtgaacatcaacgcccctatcgagctggctaacagcaacaaggcaactactatcgggatctacagcgacggcgacgccaaggtaaaattcggggccagctcctcacttaagatcggggaaaaggctgtggggctctacagcgccgaccccacaaagttcaacaacacattcgaaatcgaaaccggcaagacactgaacgtggagctaggtaagaacagcacattcggccttctgaacggcaacaaaaacgttactaactccccactgctgtcaaagtacctgaacaacaacaccacggacggcggaggctctggaggagggtccggagggggctcagaaagccaggtgcggcagcagttcagcaaagatatcattaagctgctgaacgagcaagtgaacaaggaaatgaacagcagcaacctgtacatgtctatgagctcttggtgctacacccacagcctggacggcgccggcctgttcctgttcgaccacgccgctgaagaatacgagcacgctaaaaagctgatcatcttcctgaacgaaaacaacgtgcccgtgcagctgaccagcatctccgcccctgagcacaagttcgagggcctcacccagatcttccagaaggcctacgagcacgaacaacacatcagcgagagcatcaacaacatcgtggaccacgccatcaagtccaaggaccacgccacattcaacttcctgcagtggtacgtcgccgagcagcacgaggaagaggtgctgttcaaggacatcctggacaagatcgagctgatcggaaacgagaaccacggcctgtacctggccgaccagtacgtgaagggcatcgccaaaagcagaaagagctgatga

SEQ ID NO: 86 - DNA, 2313 bp, Fusobacterium nucleatum
  source 1..2313: mol_type = other DNA
atggaaacagacacattgctgctatgggtcctgctgctctgggttccaggctccactggtgacgaatctagcgagaagcacaacagccaccagggctggaaggccagctggtccaagaccatcaacgtgacagagctgaccaaccggaactacgtgtccctgacaagagacaccgctgactcgaccatcccaacagaccaggtgataaacgtgaccaaagagaacaacagagccatggtggttgacgaggtgagaaagaacgggatcgtagtggacttcaagggcaccatcaacctgcagagaagccagaacgtgggcatcgacctgcaaggtacacaccagggcagcaagagcgacccactgatcgccaacatctacaactccggaaagatcatcggcaacgccaaatacggaagcacggccaacaaggagcagatcgccttcggattcaacaacgccgacggctccaacaacacgaccatgaccaacatggtgaacaaaggagagataacactgaacgcgccttcctccgccggtatccaactgaagcctgaagacccccacgactggcagcctaactcttggaacgccgcgccactgcaaatcgacaacaagacgcccaacaaaatcaagggcagagtgctgatgaaggctgacaaccagaaagacataaacctgaacggctcaggcagcttcggcatggtcaccgtgttcaacgagggcgtacccaagagactgttcgcacccagctacgtaacaaactacgagaacttgcggtccgagcggacatacgacggcgagagagtgctgccaggcggcgagatcggccggagcgctctgtctgactctaaatacacatccggcgtgtacaacaccggcaacatcaacatcaacggtgacagctctatcggcgtgggcctgctgcaggagatacaggaggtgaagctcgccgggaacatcaacataggcaccaaggctgttacacaggagactggcatcagcaacctgcccaacgccgggtcgaaaacctacagcatcaacaaggtcgaagaggccgtgggagtgttcgccggcgtccctacgatgcctgtgaagcctggcgagacagacaccctgatcaacggctctggcgcaagaaacacagccacttccttggtgggcaccgagacagtggagatcaacggaaacatcagcctcggcgagcacgcgacccagtcaatcggcgccctggtgggcgacacggaagtggacctcaacaagggtcagctgaccgagaacggcgtaaacaaaggctctaacgccgacagaaagctgaagagaagcggggacatcacagcaaagagcaacagcatcatcaacgtgggcggaaaaaagaactacggattcgtggtgtctaactcagcccacagcagcaagttcggcacaaccgtggacagcctcgagtacaaggtggacaaaacccaccacggaaaaggcatcaacgaaggcaaaatcaacgtaacgggcgacgagtccgttggtttcgccatgatcaagggaggcgacagcaagagcagcggcatcatctctgtaggcaacaacgcggagaactccatcggcttctacggcaaggaggactccttcaccaacagcgggacaatagaggtgacgagcgcaaagaagaagaacaaggccgtagtgctggacgggacaaacgcttctaacaagatcaacttcaccaacaccggtaacatatacgtcaacactagcgacaacggaaacaagaacttggacggggacggcaacatcggtatctacgcccaaggtaactacaaaatcgagcacaacagcggcatcgtcaaggccggaaaggacgccatcgccttctacgtgaaaaactcaacaggagaagtgaacatcaacgcccctatcgagctggctaacagcaacaaggcaactactatcgggatctacagcgacggcgacgccaaggtaaaattcggggccagctcctcacttaagatcggggaaaaggctgtggggctctacagcgccgaccccacaaagttcaacaacacattcgaaatcgaaaccggcaagacactgaacgtggagctaggtaagaacagcacattcggccttctgaacggcaacaaaaacgttactaactccccactgctgtcaaagtacctgaacaacaacaccacggacggcggaggctctggaggagggtccggagggggctcaggctacatccccgaggcccctagagatggccaggcctacgtgcggaaggacggagaatgggtgctgctgagcaccttcctgtgatga

SEQ ID NO: 87 - DNA, 2847 bp, Fusobacterium nucleatum
  source 1..2847: mol_type = other DNA
atggaaacagacacattgctgctatgggtcctgctgctctgggttccaggctccactggtgacgaatctagcgagaagcacaacagccaccagggctggaaggccagctggtccaagaccatcaacgtgacagagctgaccaaccggaactacgtgtccctgacaagagacaccgctgactcgaccatcccaacagaccaggtgataaacgtgaccaaagagaacaacagagccatggtggttgacgaggtgagaaagaacgggatcgtagtggacttcaagggcaccatcaacctgcagagaagccagaacgtgggcatcgacctgcaaggtacacaccagggcagcaagagcgacccactgatcgccaacatctacaactccggaaagatcatcggcaacgccaaatacggaagcacggccaacaaggagcagatcgccttcggattcaacaacgccgacggctccaacaacacgaccatgaccaacatggtgaacaaaggagagataacactgaacgcgccttcctccgccggtatccaactgaagcctgaagacccccacgactggcagcctaactcttggaacgccgcgccactgcaaatcgacaacaagacgcccaacaaaatcaagggcagagtgctgatgaaggctgacaaccagaaagacataaacctgaacggctcaggcagcttcggcatggtcaccgtgttcaacgagggcgtacccaagagactgttcgcacccagctacgtaacaaactacgagaacttgcggtccgagcggacatacgacggcgagagagtgctgccaggcggcgagatcggccggagcgctctgtctgactctaaatacacatccggcgtgtacaacaccggcaacatcaacatcaacggtgacagctctatcggcgtgggcctgctgcaggagatacaggaggtgaagctcgccgggaacatcaacataggcaccaaggctgttacacaggagactggcatcagcaacctgcccaacgccgggtcgaaaacctacagcatcaacaaggtcgaagaggccgtgggagtgttcgccggcgtccctacgatgcctgtgaagcctggcgagacagacaccctgatcaacggctctggcgcaagaaacacagccacttccttggtgggcaccgagacagtggagatcaacggaaacatcagcctcggcgagcacgcgacccagtcaatcggcgccctggtgggcgacacggaagtggacctcaacaagggtcagctgaccgagaacggcgtaaacaaaggctctaacgccgacagaaagctgaagagaagcggggacatcacagcaaagagcaacagcatcatcaacgtgggcggaaaaaagaactacggattcgtggtgtctaactcagcccacagcagcaagttcggcacaaccgtggacagcctcgagtacaaggtggacaaaacccaccacggaaaaggcatcaacgaaggcaaaatcaacgtaacgggcgacgagtccgttggtttcgccatgatcaagggaggcgacagcaagagcagcggcatcatctctgtaggcaacaacgcggagaactccatcggcttctacggcaaggaggactccttcaccaacagcgggacaatagaggtgacgagcgcaaagaagaagaacaaggccgtagtgctggacgggacaaacgcttctaacaagatcaacttcaccaacaccggtaacatatacgtcaacactagcgacaacggaaacaagaacttggacggggacggcaacatcggtatctacgcccaaggtaactacaaaatcgagcacaacagcggcatcgtcaaggccggaaaggacgccatcgccttctacgtgaaaaactcaacaggagaagtgaacatcaacgcccctatcgagctggctaacagcaacaaggcaactactatcgggatctacagcgacggcgacgccaaggtaaaattcggggccagctcctcacttaagatcggggaaaaggctgtggggctctacagcgccgaccccacaaagttcaacaacacattcgaaatcgaaaccggcaagacactgaacgtggagctaggtaagaacagcacattcggccttctgaacggcaacaaaaacgttactaactccccactgctgtcaaagtacctgaacaacaacaccacggacggcggaggctctggaggagggtccggagggggctcaatgaagatggaggagctgttcaagaagcacaagatcgtggccgtgctgagagccaacagcgtggaagaagccaagaaaaaggctctggccgtgttcctgggaggcgtgcacctgatcgagatcacattcaccgtgcccgacgccgacaccgtgatcaaggagctctctttcctgaaagagatgggcgccatcatcggcgccggcaccgtgacaagcgtggagcaggccagaaaggccgtcgagagcggcgctgaattcatcgtgtcccctcacctggacgaggaaatcagccagttcgccaaggagaagggcgtgttctacatgcctggcgtgatgacccctacagagctggtcaaggccatgaaactgggccacaccatcctgaagctgttccccggcgaggtggtgggcccccagttcgtgaaggctatgaaaggacctttccctaacgtgaagttcgtgccaaccggcggcgtgaacctggacaacgtttgcgaatggttcaaggccggagttctggccgtgggcgtcggatctgccctggtgaagggcacacctgtggaagtggccgagaaagctaaggccttcgtggaaaagatccggggctgcaccgagtgatga

SEQ ID NO: 88 - DNA, 2394 bp, Fusobacterium nucleatum
  source 1..2394: mol_type = other DNA
atggaaacagacacattgctgctatgggtcctgctgctctgggttccaggctccactggtgacgaatctagcgagaagcacaacagccaccagggctggaaggccagctggtccaagaccatcaacgtgacagagctgaccaaccggaactacgtgtccctgacaagagacaccgctgactcgaccatcccaacagaccaggtgataaacgtgaccaaagagaacaacagagccatggtggttgacgaggtgagaaagaacgggatcgtagtggacttcaagggcaccatcaacctgcagagaagccagaacgtgggcatcgacctgcaaggtacacaccagggcagcaagagcgacccactgatcgccaacatctacaactccggaaagatcatcggcaacgccaaatacggaagcacggccaacaaggagcagatcgccttcggattcaacaacgccgacggctccaacaacacgaccatgaccaacatggtgaacaaaggagagataacactgaacgcgccttcctccgccggtatccaactgaagcctgaagacccccacgactggcagcctaactcttggaacgccgcgccactgcaaatcgacaacaagacgcccaacaaaatcaagggcagagtgctgatgaaggctgacaaccagaaagacataaacctgaacggctcaggcagcttcggcatggtcaccgtgttcaacgagggcgtacccaagagactgttcgcacccagctacgtaacaaactacgagaacttgcggtccgagcggacatacgacggcgagagagtgctgccaggcggcgagatcggccggagcgctctgtctgactctaaatacacatccggcgtgtacaacaccggcaacatcaacatcaacggtgacagctctatcggcgtgggcctgctgcaggagatacaggaggtgaagctcgccgggaacatcaacataggcaccaaggctgttacacaggagactggcatcagcaacctgcccaacgccgggtcgaaaacctacagcatcaacaaggtcgaagaggccgtgggagtgttcgccggcgtccctacgatgcctgtgaagcctggcgagacagacaccctgatcaacggctctggcgcaagaaacacagccacttccttggtgggcaccgagacagtggagatcaacggaaacatcagcctcggcgagcacgcgacccagtcaatcggcgccctggtgggcgacacggaagtggacctcaacaagggtcagctgaccgagaacggcgtaaacaaaggctctaacgccgacagaaagctgaagagaagcggggacatcacagcaaagagcaacagcatcatcaacgtgggcggaaaaaagaactacggattcgtggtgtctaactcagcccacagcagcaagttcggcacaaccgtggacagcctcgagtacaaggtggacaaaacccaccacggaaaaggcatcaacgaaggcaaaatcaacgtaacgggcgacgagtccgttggtttcgccatgatcaagggaggcgacagcaagagcagcggcatcatctctgtaggcaacaacgcggagaactccatcggcttctacggcaaggaggactccttcaccaacagcgggacaatagaggtgacgagcgcaaagaagaagaacaaggccgtagtgctggacgggacaaacgcttctaacaagatcaacttcaccaacaccggtaacatatacgtcaacactagcgacaacggaaacaagaacttggacggggacggcaacatcggtatctacgcccaaggtaactacaaaatcgagcacaacagcggcatcgtcaaggccggaaaggacgccatcgccttctacgtgaaaaactcaacaggagaagtgaacatcaacgcccctatcgagctggctaacagcaacaaggcaactactatcgggatctacagcgacggcgacgccaaggtaaaattcggggccagctcctcacttaagatcggggaaaaggctgtggggctctacagcgccgaccccacaaagttcaacaacacattcgaaatcgaaaccggcaagacactgaacgtggagctaggtaagaacagcacattcggccttctgaacggcaacaaaaacgttactaactccccactgctgtcaaagtacctgaacaacaacaccacggacggcggaggctctgctgtgggccaggacacgcaggaggtcatcgtggtgccacactccttgccctttaaggtggtggtcatcagcgccatcctggccctggtggtgctgaccatcatctctctgatcatcctgatcatgctgtggcagaaaaagcctagaggcggaggctctgcctggtcccacccccaattcgagaagtgatga

SEQ ID NO: 89 - DNA, 3876 bp, Fusobacterium nucleatum
  source 1..3876: mol_type = other DNA
atggaaacagacacattgctgctatgggtcctgctgctctgggttccaggctccactggtgacgaatctagcgagaagcacaacagccaccagggctggaaggccagctggtccaagaccatcaacgtgacagagctgaccaaccggaactacgtgtccctgacaagagacaccgctgactcgaccatcccaacagaccaggtgataaacgtgaccaaagagaacaacagagccatggtggttgacgaggtgagaaagaacgggatcgtagtggacttcaagggcaccatcaacctgcagagaagccagaacgtgggcatcgacctgcaaggtacacaccagggcagcaagagcgacccactgatcgccaacatctacaactccggaaagatcatcggcaacgccaaatacggaagcacggccaacaaggagcagatcgccttcggattcaacaacgccgacggctccaacaacacgaccatgaccaacatggtgaacaaaggagagataacactgaacgcgccttcctccgccggtatccaactgaagcctgaagacccccacgactggcagcctaactcttggaacgccgcgccactgcaaatcgacaacaagacgcccaacaaaatcaagggcagagtgctgatgaaggctgacaaccagaaagacataaacctgaacggctcaggcagcttcggcatggtcaccgtgttcaacgagggcgtacccaagagactgttcgcacccagctacgtaacaaactacgagaacttgcggtccgagcggacatacgacggcgagagagtgctgccaggcggcgagatcggccggagcgctctgtctgactctaaatacacatccggcgtgtacaacaccggcaacatcaacatcaacggtgacagctctatcggcgtgggcctgctgcaggagatacaggaggtgaagctcgccgggaacatcaacataggcaccaaggctgttacacaggagactggcatcagcaacctgcccaacgccgggtcgaaaacctacagcatcaacaaggtcgaagaggccgtgggagtgttcgccggcgtccctacgatgcctgtgaagcctggcgagacagacaccctgatcaacggctctggcgcaagaaacacagccacttccttggtgggcaccgagacagtggagatcaacggaaacatcagcctcggcgagcacgcgacccagtcaatcggcgccctggtgggcgacacggaagtggacctcaacaagggtcagctgaccgagaacggcgtaaacaaaggctctaacgccgacagaaagctgaagagaagcggggacatcacagcaaagagcaacagcatcatcaacgtgggcggaaaaaagaactacggattcgtggtgtctaactcagcccacagcagcaagttcggcacaaccgtggacagcctcgagtacaaggtggacaaaacccaccacggaaaaggcatcaacgaaggcaaaatcaacgtaacgggcgacgagtccgttggtttcgccatgatcaagggaggcgacagcaagagcagcggcatcatctctgtaggcaacaacgcggagaactccatcggcttctacggcaaggaggactccttcaccaacagcgggacaatagaggtgacgagcgcaaagaagaagaacaaggccgtagtgctggacgggacaaacgcttctaacaagatcaacttcaccaacaccggtaacatatacgtcaacactagcgacaacggaaacaagaacttggacggggacggcaacatcggtatctacgcccaaggtaactacaaaatcgagcacaacagcggcatcgtcaaggccggaaaggacgccatcgccttctacgtgaaaaactcaacaggagaagtgaacatcaacgcccctatcgagctggctaacagcaacaaggcaactactatcgggatctacagcgacggcgacgccaaggtaaaattcggggccagctcctcacttaagatcggggaaaaggctgtggggctctacagcgccgaccccacaaagttcaacaacacattcgaaatcgaaaccggcaagacactgaacgtggagctaggtaagaacagcacattcggccttctgaacggcaacaaaaacgttactaactccccactgctgtcaaagtacctgaacaacaacaccacggacaagatcaacatcaccaagttcgacgaaggcgcctccctgttctacgccacactgaaggccaaggccatcctggacgaggactacaaggtgacaaacgctgacgccgctagcacctctgtcctagtggccaacgacggggccaacgtggagatcgccagcgggaagaagctggaaaccaacacaaacgtgggcctggtggccaccaagggggctggcgcctctctgagcacctcagttgcggaaaacaaggggacccttatctctactcggacagacaagggcatcggcatctacacgtacacagccaacggtgagaacagcggaaccatcatcatgaaaaaccagaactccgttgggatactgggctccggaggatccaacctgaagaacacagggaagatcgagctggaagctatcagcagcgccggcgtgtacgccgaaaacagcaacatgatcaacagcgggacagcatcagagatcgtagtgaaaaagaaggcgtccgtgggcatctacgcccgcgaaacaagcatcagctctgtgccaaagaacgtgaaaaacgaggggaaaatcgagataaaagccgacggcgacgggaaatccgccggcatctactcgaagaaggagggcggcgccaaactgaccatcgaaaacacggggaacatcgaggtcgctcaaaaagcatcggccggcatctacgcgaaaaacgaatctaaccaggccaacacagagtctgtcgtgaccaacagcggcttaatcaagatgagcgccgagaacagcatcggcatcatgggcgaaaagagcaaggtagaaaactcaggtaccggaacaaaggggatcgagatcgccggaaaaaagagcgcaggcatcctggtgacaaaggaatctgaagtggtgaactccggcaggatccttctggccaacaactcaatcctggcgagctctgacggcctcgttggcatcagcgttgacggcagcagcacgggcgagaacgacgcctcaggagagatcaagatcgacgccgcctactctacaggaatgctctcttctggaggcgacatcaccaacgcaggaaaaatcgacctggaaaaaaaggaatctataggcatctacgccacaaacgccaacgtgacaaacaacggggctaccacgaaaggcatcttcatcaaggacgaaaagagcgttggcatctacagcaagatcaacagctctagcacggccgacaagatcgtcacaaactctggtaccatcgacataggcggaacaagcaagaccgggtccgcgggcatctactctatcgtggagaacggagctactaagagactgagcacggtatcctcggggaacatcaccatctctcagaaggagtcagtgggtatctacgccaagaacaaatcaagccaggccaacatcgagtctgttgttacaaactcagggaacggcaagatcgaggtcaagaacgagggctctgccggcatcctggtggaaaagagcaaggttaccaacacagctgtaggcaccaacggcataatcgtgagcgccaagaagtctgccggaataatcgggaagctgggcagcgaaatcatcaactcaggcataatcaagactgaaacagccacaccaacggccgccgccgacggtgtcggcggaggctctgcctggtcccacccccaattcgagaagtgatga

SEQ ID NO: 90 - DNA, 4266 bp, Fusobacterium nucleatum
  source 1..4266: mol_type = other DNA
atggaaacagacacattgctgctatgggtcctgctgctctgggttccaggctccactggtgacgaatctagcgagaagcacaacagccaccagggctggaaggccagctggtccaagaccatcaacgtgacagagctgaccaaccggaactacgtgtccctgacaagagacaccgctgactcgaccatcccaacagaccaggtgataaacgtgaccaaagagaacaacagagccatggtggttgacgaggtgagaaagaacgggatcgtagtggacttcaagggcaccatcaacctgcagagaagccagaacgtgggcatcgacctgcaaggtacacaccagggcagcaagagcgacccactgatcgccaacatctacaactccggaaagatcatcggcaacgccaaatacggaagcacggccaacaaggagcagatcgccttcggattcaacaacgccgacggctccaacaacacgaccatgaccaacatggtgaacaaaggagagataacactgaacgcgccttcctccgccggtatccaactgaagcctgaagacccccacgactggcagcctaactcttggaacgccgcgccactgcaaatcgacaacaagacgcccaacaaaatcaagggcagagtgctgatgaaggctgacaaccagaaagacataaacctgaacggctcaggcagcttcggcatggtcaccgtgttcaacgagggcgtacccaagagactgttcgcacccagctacgtaacaaactacgagaacttgcggtccgagcggacatacgacggcgagagagtgctgccaggcggcgagatcggccggagcgctctgtctgactctaaatacacatccggcgtgtacaacaccggcaacatcaacatcaacggtgacagctctatcggcgtgggcctgctgcaggagatacaggaggtgaagctcgccgggaacatcaacataggcaccaaggctgttacacaggagactggcatcagcaacctgcccaacgccgggtcgaaaacctacagcatcaacaaggtcgaagaggccgtgggagtgttcgccggcgtccctacgatgcctgtgaagcctggcgagacagacaccctgatcaacggctctggcgcaagaaacacagccacttccttggtgggcaccgagacagtggagatcaacggaaacatcagcctcggcgagcacgcgacccagtcaatcggcgccctggtgggcgacacggaagtggacctcaacaagggtcagctgaccgagaacggcgtaaacaaaggctctaacgccgacagaaagctgaagagaagcggggacatcacagcaaagagcaacagcatcatcaacgtgggcggaaaaaagaactacggattcgtggtgtctaactcagcccacagcagcaagttcggcacaaccgtggacagcctcgagtacaaggtggacaaaacccaccacggaaaaggcatcaacgaaggcaaaatcaacgtaacgggcgacgagtccgttggtttcgccatgatcaagggaggcgacagcaagagcagcggcatcatctctgtaggcaacaacgcggagaactccatcggcttctacggcaaggaggactccttcaccaacagcgggacaatagaggtgacgagcgcaaagaagaagaacaaggccgtagtgctggacgggacaaacgcttctaacaagatcaacttcaccaacaccggtaacatatacgtcaacactagcgacaacggaaacaagaacttggacggggacggcaacatcggtatctacgcccaaggtaactacaaaatcgagcacaacagcggcatcgtcaaggccggaaaggacgccatcgccttctacgtgaaaaactcaacaggagaagtgaacatcaacgcccctatcgagctggctaacagcaacaaggcaactactatcgggatctacagcgacggcgacgccaaggtaaaattcggggccagctcctcacttaagatcggggaaaaggctgtggggctctacagcgccgaccccacaaagttcaacaacacattcgaaatcgaaaccggcaagacactgaacgtggagctaggtaagaacagcacattcggccttctgaacggcaacaaaaacgttactaactccccactgctgtcaaagtacctgaacaacaacaccacggacaagatcaacatcaccaagttcgacgaaggcgcctccctgttctacgccacactgaaggccaaggccatcctggacgaggactacaaggtgacaaacgctgacgccgctagcacctctgtcctagtggccaacgacggggccaacgtggagatcgccagcgggaagaagctggaaaccaacacaaacgtgggcctggtggccaccaagggggctggcgcctctctgagcacctcagttgcggaaaacaaggggacccttatctctactcggacagacaagggcatcggcatctacacgtacacagccaacggtgagaacagcggaaccatcatcatgaaaaaccagaactccgttgggatactgggctccggaggatccaacctgaagaacacagggaagatcgagctggaagctatcagcagcgccggcgtgtacgccgaaaacagcaacatgatcaacagcgggacagcatcagagatcgtagtgaaaaagaaggcgtccgtgggcatctacgcccgcgaaacaagcatcagctctgtgccaaagaacgtgaaaaacgaggggaaaatcgagataaaagccgacggcgacgggaaatccgccggcatctactcgaagaaggagggcggcgccaaactgaccatcgaaaacacggggaacatcgaggtcgctcaaaaagcatcggccggcatctacgcgaaaaacgaatctaaccaggccaacacagagtctgtcgtgaccaacagcggcttaatcaagatgagcgccgagaacagcatcggcatcatgggcgaaaagagcaaggtagaaaactcaggtaccggaacaaaggggatcgagatcgccggaaaaaagagcgcaggcatcctggtgacaaaggaatctgaagtggtgaactccggcaggatccttctggccaacaactcaatcctggcgagctctgacggcctcgttggcatcagcgttgacggcagcagcacgggcgagaacgacgcctcaggagagatcaagatcgacgccgcctactctacaggaatgctctcttctggaggcgacatcaccaacgcaggaaaaatcgacctggaaaaaaaggaatctataggcatctacgccacaaacgccaacgtgacaaacaacggggctaccacgaaaggcatcttcatcaaggacgaaaagagcgttggcatctacagcaagatcaacagctctagcacggccgacaagatcgtcacaaactctggtaccatcgacataggcggaacaagcaagaccgggtccgcgggcatctactctatcgtggagaacggagctactaagagactgagcacggtatcctcggggaacatcaccatctctcagaaggagtcagtgggtatctacgccaagaacaaatcaagccaggccaacatcgagtctgttgttacaaactcagggaacggcaagatcgaggtcaagaacgagggctctgccggcatcctggtggaaaagagcaaggttaccaacacagctgtaggcaccaacggcataatcgtgagcgccaagaagtctgccggaataatcgggaagctgggcagcgaaatcatcaactcaggcataatcaagactgaaacagccacaccaacggccgccgccgacggtgtcggcggaggctctggaggagggtccggagggggctcaatggccaacaaacctatgcagccaatcaccagcaccgcaaacaagatcgtgtggtccgaccctacaagactgagcaccaccttcagcgctagcctgctgagacaaagagtgaaagtgggcatcgccgagctgaacaacgtgtctggacagtacgtgtccgtgtacaagcggcccgcccctaagcctgagggctgcgccgacgcctgcgtgatcatgcctaacgagaaccagagcatccggaccgtgatcagcggcagcgctgaaaacctggccacactcaaggccgaatgggagacacacaagagaaacgtcgacaccctgttcgccagcggcaacgccggcctgggcttcctggaccccaccgccgctatcgtgtcttctgacaccacagcctgatga

SEQ ID NO: 91 - DNA, 4098 bp, Fusobacterium nucleatum
  source 1..4098: mol_type = other DNA
atggaaacagacacattgctgctatgggtcctgctgctctgggttccaggctccactggtgacgaatctagcgagaagcacaacagccaccagggctggaaggccagctggtccaagaccatcaacgtgacagagctgaccaaccggaactacgtgtccctgacaagagacaccgctgactcgaccatcccaacagaccaggtgataaacgtgaccaaagagaacaacagagccatggtggttgacgaggtgagaaagaacgggatcgtagtggacttcaagggcaccatcaacctgcagagaagccagaacgtgggcatcgacctgcaaggtacacaccagggcagcaagagcgacccactgatcgccaacatctacaactccggaaagatcatcggcaacgccaaatacggaagcacggccaacaaggagcagatcgccttcggattcaacaacgccgacggctccaacaacacgaccatgaccaacatggtgaacaaaggagagataacactgaacgcgccttcctccgccggtatccaactgaagcctgaagacccccacgactggcagcctaactcttggaacgccgcgccactgcaaatcgacaacaagacgcccaacaaaatcaagggcagagtgctgatgaaggctgacaaccagaaagacataaacctgaacggctcaggcagcttcggcatggtcaccgtgttcaacgagggcgtacccaagagactgttcgcacccagctacgtaacaaactacgagaacttgcggtccgagcggacatacgacggcgagagagtgctgccaggcggcgagatcggccggagcgctctgtctgactctaaatacacatccggcgtgtacaacaccggcaacatcaacatcaacggtgacagctctatcggcgtgggcctgctgcaggagatacaggaggtgaagctcgccgggaacatcaacataggcaccaaggctgttacacaggagactggcatcagcaacctgcccaacgccgggtcgaaaacctacagcatcaacaaggtcgaagaggccgtgggagtgttcgccggcgtccctacgatgcctgtgaagcctggcgagacagacaccctgatcaacggctctggcgcaagaaacacagccacttccttggtgggcaccgagacagtggagatcaacggaaacatcagcctcggcgagcacgcgacccagtcaatcggcgccctggtgggcgacacggaagtggacctcaacaagggtcagctgaccgagaacggcgtaaacaaaggctctaacgccgacagaaagctgaagagaagcggggacatcacagcaaagagcaacagcatcatcaacgtgggcggaaaaaagaactacggattcgtggtgtctaactcagcccacagcagcaagttcggcacaaccgtggacagcctcgagtacaaggtggacaaaacccaccacggaaaaggcatcaacgaaggcaaaatcaacgtaacgggcgacgagtccgttggtttcgccatgatcaagggaggcgacagcaagagcagcggcatcatctctgtaggcaacaacgcggagaactccatcggcttctacggcaaggaggactccttcaccaacagcgggacaatagaggtgacgagcgcaaagaagaagaacaaggccgtagtgctggacgggacaaacgcttctaacaagatcaacttcaccaacaccggtaacatatacgtcaacactagcgacaacggaaacaagaacttggacggggacggcaacatcggtatctacgcccaaggtaactacaaaatcgagcacaacagcggcatcgtcaaggccggaaaggacgccatcgccttctacgtgaaaaactcaacaggagaagtgaacatcaacgcccctatcgagctggctaacagcaacaaggcaactactatcgggatctacagcgacggcgacgccaaggtaaaattcggggccagctcctcacttaagatcggggaaaaggctgtggggctctacagcgccgaccccacaaagttcaacaacacattcgaaatcgaaaccggcaagacactgaacgtggagctaggtaagaacagcacattcggccttctgaacggcaacaaaaacgttactaactccccactgctgtcaaagtacctgaacaacaacaccacggacaagatcaacatcaccaagttcgacgaaggcgcctccctgttctacgccacactgaaggccaaggccatcctggacgaggactacaaggtgacaaacgctgacgccgctagcacctctgtcctagtggccaacgacggggccaacgtggagatcgccagcgggaagaagctggaaaccaacacaaacgtgggcctggtggccaccaagggggctggcgcctctctgagcacctcagttgcggaaaacaaggggacccttatctctactcggacagacaagggcatcggcatctacacgtacacagccaacggtgagaacagcggaaccatcatcatgaaaaaccagaactccgttgggatactgggctccggaggatccaacctgaagaacacagggaagatcgagctggaagctatcagcagcgccggcgtgtacgccgaaaacagcaacatgatcaacagcgggacagcatcagagatcgtagtgaaaaagaaggcgtccgtgggcatctacgcccgcgaaacaagcatcagctctgtgccaaagaacgtgaaaaacgaggggaaaatcgagataaaagccgacggcgacgggaaatccgccggcatctactcgaagaaggagggcggcgccaaactgaccatcgaaaacacggggaacatcgaggtcgctcaaaaagcatcggccggcatctacgcgaaaaacgaatctaaccaggccaacacagagtctgtcgtgaccaacagcggcttaatcaagatgagcgccgagaacagcatcggcatcatgggcgaaaagagcaaggtagaaaactcaggtaccggaacaaaggggatcgagatcgccggaaaaaagagcgcaggcatcctggtgacaaaggaatctgaagtggtgaactccggcaggatccttctggccaacaactcaatcctggcgagctctgacggcctcgttggcatcagcgttgacggcagcagcacgggcgagaacgacgcctcaggagagatcaagatcgacgccgcctactctacaggaatgctctcttctggaggcgacatcaccaacgcaggaaaaatcgacctggaaaaaaaggaatctataggcatctacgccacaaacgccaacgtgacaaacaacggggctaccacgaaaggcatcttcatcaaggacgaaaagagcgttggcatctacagcaagatcaacagctctagcacggccgacaagatcgtcacaaactctggtaccatcgacataggcggaacaagcaagaccgggtccgcgggcatctactctatcgtggagaacggagctactaagagactgagcacggtatcctcggggaacatcaccatctctcagaaggagtcagtgggtatctacgccaagaacaaatcaagccaggccaacatcgagtctgttgttacaaactcagggaacggcaagatcgaggtcaagaacgagggctctgccggcatcctggtggaaaagagcaaggttaccaacacagctgtaggcaccaacggcataatcgtgagcgccaagaagtctgccggaataatcgggaagctgggcagcgaaatcatcaactcaggcataatcaagactgaaacagccacaccaacggccgccgccgacggtgtcggcggaggctctcccccagaagaccctcctgatagcaagaacaccctggtgctgttcggcgctggcttcggcgccgtgatcacagtggtggtgatcgtggtcatcatcaagtgcttctgcaagcacagatcttgcttcagacggaacgaggccagcagagagacaaacaacagcctgaccttcggacctgaggaagccctggccgagcagaccgtgttcctgggcggaggctctgcctggtcccacccccaattcgagaagtgatga

SEQ ID NO: 92 - DNA, 4635 bp, Fusobacterium nucleatum
  source 1..4635: mol_type = other DNA
atggaaacagacacattgctgctatgggtcctgctgctctgggttccaggctccactggtgacgaatctagcgagaagcacaacagccaccagggctggaaggccagctggtccaagaccatcaacgtgacagagctgaccaaccggaactacgtgtccctgacaagagacaccgctgactcgaccatcccaacagaccaggtgataaacgtgaccaaagagaacaacagagccatggtggttgacgaggtgagaaagaacgggatcgtagtggacttcaagggcaccatcaacctgcagagaagccagaacgtgggcatcgacctgcaaggtacacaccagggcagcaagagcgacccactgatcgccaacatctacaactccggaaagatcatcggcaacgccaaatacggaagcacggccaacaaggagcagatcgccttcggattcaacaacgccgacggctccaacaacacgaccatgaccaacatggtgaacaaaggagagataacactgaacgcgccttcctccgccggtatccaactgaagcctgaagacccccacgactggcagcctaactcttggaacgccgcgccactgcaaatcgacaacaagacgcccaacaaaatcaagggcagagtgctgatgaaggctgacaaccagaaagacataaacctgaacggctcaggcagcttcggcatggtcaccgtgttcaacgagggcgtacccaagagactgttcgcacccagctacgtaacaaactacgagaacttgcggtccgagcggacatacgacggcgagagagtgctgccaggcggcgagatcggccggagcgctctgtctgactctaaatacacatccggcgtgtacaacaccggcaacatcaacatcaacggtgacagctctatcggcgtgggcctgctgcaggagatacaggaggtgaagctcgccgggaacatcaacataggcaccaaggctgttacacaggagactggcatcagcaacctgcccaacgccgggtcgaaaacctacagcatcaacaaggtcgaagaggccgtgggagtgttcgccggcgtccctacgatgcctgtgaagcctggcgagacagacaccctgatcaacggctctggcgcaagaaacacagccacttccttggtgggcaccgagacagtggagatcaacggaaacatcagcctcggcgagcacgcgacccagtcaatcggcgccctggtgggcgacacggaagtggacctcaacaagggtcagctgaccgagaacggcgtaaacaaaggctctaacgccgacagaaagctgaagagaagcggggacatcacagcaaagagcaacagcatcatcaacgtgggcggaaaaaagaactacggattcgtggtgtctaactcagcccacagcagcaagttcggcacaaccgtggacagcctcgagtacaaggtggacaaaacccaccacggaaaaggcatcaacgaaggcaaaatcaacgtaacgggcgacgagtccgttggtttcgccatgatcaagggaggcgacagcaagagcagcggcatcatctctgtaggcaacaacgcggagaactccatcggcttctacggcaaggaggactccttcaccaacagcgggacaatagaggtgacgagcgcaaagaagaagaacaaggccgtagtgctggacgggacaaacgcttctaacaagatcaacttcaccaacaccggtaacatatacgtcaacactagcgacaacggaaacaagaacttggacggggacggcaacatcggtatctacgcccaaggtaactacaaaatcgagcacaacagcggcatcgtcaaggccggaaaggacgccatcgccttctacgtgaaaaactcaacaggagaagtgaacatcaacgcccctatcgagctggctaacagcaacaaggcaactactatcgggatctacagcgacggcgacgccaaggtaaaattcggggccagctcctcacttaagatcggggaaaaggctgtggggctctacagcgccgaccccacaaagttcaacaacacattcgaaatcgaaaccggcaagacactgaacgtggagctaggtaagaacagcacattcggccttctgaacggcaacaaaaacgttactaactccccactgctgtcaaagtacctgaacaacaacaccacggacaagatcaacatcaccaagttcgacgaaggcgcctccctgttctacgccacactgaaggccaaggccatcctggacgaggactacaaggtgacaaacgctgacgccgctagcacctctgtcctagtggccaacgacggggccaacgtggagatcgccagcgggaagaagctggaaaccaacacaaacgtgggcctggtggccaccaagggggctggcgcctctctgagcacctcagttgcggaaaacaaggggacccttatctctactcggacagacaagggcatcggcatctacacgtacacagccaacggtgagaacagcggaaccatcatcatgaaaaaccagaactccgttgggatactgggctccggaggatccaacctgaagaacacagggaagatcgagctggaagctatcagcagcgccggcgtgtacgccgaaaacagcaacatgatcaacagcgggacagcatcagagatcgtagtgaaaaagaaggcgtccgtgggcatctacgcccgcgaaacaagcatcagctctgtgccaaagaacgtgaaaaacgaggggaaaatcgagataaaagccgacggcgacgggaaatccgccggcatctactcgaagaaggagggcggcgccaaactgaccatcgaaaacacggggaacatcgaggtcgctcaaaaagcatcggccggcatctacgcgaaaaacgaatctaaccaggccaacacagagtctgtcgtgaccaacagcggcttaatcaagatgagcgccgagaacagcatcggcatcatgggcgaaaagagcaaggtagaaaactcaggtaccggaacaaaggggatcgagatcgccggaaaaaagagcgcaggcatcctggtgacaaaggaatctgaagtggtgaactccggcaggatccttctggccaacaactcaatcctggcgagctctgacggcctcgttggcatcagcgttgacggcagcagcacgggcgagaacgacgcctcaggagagatcaagatcgacgccgcctactctacaggaatgctctcttctggaggcgacatcaccaacgcaggaaaaatcgacctggaaaaaaaggaatctataggcatctacgccacaaacgccaacgtgacaaacaacggggctaccacgaaaggcatcttcatcaaggacgaaaagagcgttggcatctacagcaagatcaacagctctagcacggccgacaagatcgtcacaaactctggtaccatcgacataggcggaacaagcaagaccgggtccgcgggcatctactctatcgtggagaacggagctactaagagactgagcacggtatcctcggggaacatcaccatctctcagaaggagtcagtgggtatctacgccaagaacaaatcaagccaggccaacatcgagtctgttgttacaaactcagggaacggcaagatcgaggtcaagaacgagggctctgccggcatcctggtggaaaagagcaaggttaccaacacagctgtaggcaccaacggcataatcgtgagcgccaagaagtctgccggaataatcgggaagctgggcagcgaaatcatcaactcaggcataatcaagactgaaacagccacaccaacggccgccgccgacggtgtcggcggaggctctggaggagggtccggagggggctcaccagccgccgccgaagaaaaggccgcccctgccgccgctaaacctgctacaaccgagggcgagttccccgagacacgggagaagatgagcggcatccgcagagccatcgccaaggccatggtgcacagcaaacacaccgcccctcacgttacactgatggacgaggccgacgtgaccaagctggtcgcccaccggaagaagttcaaggccatcgccgccgagaaaggcatcaaactgaccttcctgccttacgtggtgaaggccctggtgtccgccctcagagaataccccgtgctgaacaccagcatcgacgacgaaaccgaggaaatcatccagaagcactactacaacatcggcatcgcggctgacaccgacagaggcctgctggtgccagtgatcaagcacgccgacagaaagcccatcttcgccctggcccaggagatcaatgagctggctgaaaaagccagagacggaaagctgacacctggcgagatgaagggcgcttcttgcaccatcacaaacatcggaagcgccggcggacagtggttcacccctgtgatcaaccaccctgaggtggccatcctgggcatcggcagaatcgccgagaagcctatcgtgcgggacggcgaaatcgtggctgctcctatgctggccctgagcctgtctttcgaccacagaatgatcgacggcgccaccgcccaaaaggcacttaaccacatcaagcggctgctgagcgaccccgagctgctgctgatggaagcctgatga

SEQ ID NO: 93 - DNA, 4392 bp, Fusobacterium nucleatum
  source 1..4392: mol_type = other DNA
atggaaacagacacattgctgctatgggtcctgctgctctgggttccaggctccactggtgacgaatctagcgagaagcacaacagccaccagggctggaaggccagctggtccaagaccatcaacgtgacagagctgaccaaccggaactacgtgtccctgacaagagacaccgctgactcgaccatcccaacagaccaggtgataaacgtgaccaaagagaacaacagagccatggtggttgacgaggtgagaaagaacgggatcgtagtggacttcaagggcaccatcaacctgcagagaagccagaacgtgggcatcgacctgcaaggtacacaccagggcagcaagagcgacccactgatcgccaacatctacaactccggaaagatcatcggcaacgccaaatacggaagcacggccaacaaggagcagatcgccttcggattcaacaacgccgacggctccaacaacacgaccatgaccaacatggtgaacaaaggagagataacactgaacgcgccttcctccgccggtatccaactgaagcctgaagacccccacgactggcagcctaactcttggaacgccgcgccactgcaaatcgacaacaagacgcccaacaaaatcaagggcagagtgctgatgaaggctgacaaccagaaagacataaacctgaacggctcaggcagcttcggcatggtcaccgtgttcaacgagggcgtacccaagagactgttcgcacccagctacgtaacaaactacgagaacttgcggtccgagcggacatacgacggcgagagagtgctgccaggcggcgagatcggccggagcgctctgtctgactctaaatacacatccggcgtgtacaacaccggcaacatcaacatcaacggtgacagctctatcggcgtgggcctgctgcaggagatacaggaggtgaagctcgccgggaacatcaacataggcaccaaggctgttacacaggagactggcatcagcaacctgcccaacgccgggtcgaaaacctacagcatcaacaaggtcgaagaggccgtgggagtgttcgccggcgtccctacgatgcctgtgaagcctggcgagacagacaccctgatcaacggctctggcgcaagaaacacagccacttccttggtgggcaccgagacagtggagatcaacggaaacatcagcctcggcgagcacgcgacccagtcaatcggcgccctggtgggcgacacggaagtggacctcaacaagggtcagctgaccgagaacggcgtaaacaaaggctctaacgccgacagaaagctgaagagaagcggggacatcacagcaaagagcaacagcatcatcaacgtgggcggaaaaaagaactacggattcgtggtgtctaactcagcccacagcagcaagttcggcacaaccgtggacagcctcgagtacaaggtggacaaaacccaccacggaaaaggcatcaacgaaggcaaaatcaacgtaacgggcgacgagtccgttggtttcgccatgatcaagggaggcgacagcaagagcagcggcatcatctctgtaggcaacaacgcggagaactccatcggcttctacggcaaggaggactccttcaccaacagcgggacaatagaggtgacgagcgcaaagaagaagaacaaggccgtagtgctggacgggacaaacgcttctaacaagatcaacttcaccaacaccggtaacatatacgtcaacactagcgacaacggaaacaagaacttggacggggacggcaacatcggtatctacgcccaaggtaactacaaaatcgagcacaacagcggcatcgtcaaggccggaaaggacgccatcgccttctacgtgaaaaactcaacaggagaagtgaacatcaacgcccctatcgagctggctaacagcaacaaggcaactactatcgggatctacagcgacggcgacgccaaggtaaaattcggggccagctcctcacttaagatcggggaaaaggctgtggggctctacagcgccgaccccacaaagttcaacaacacattcgaaatcgaaaccggcaagacactgaacgtggagctaggtaagaacagcacattcggccttctgaacggcaacaaaaacgttactaactccccactgctgtcaaagtacctgaacaacaacaccacggacaagatcaacatcaccaagttcgacgaaggcgcctccctgttctacgccacactgaaggccaaggccatcctggacgaggactacaaggtgacaaacgctgacgccgctagcacctctgtcctagtggccaacgacggggccaacgtggagatcgccagcgggaagaagctggaaaccaacacaaacgtgggcctggtggccaccaagggggctggcgcctctctgagcacctcagttgcggaaaacaaggggacccttatctctactcggacagacaagggcatcggcatctacacgtacacagccaacggtgagaacagcggaaccatcatcatgaaaaaccagaactccgttgggatactgggctccggaggatccaacctgaagaacacagggaagatcgagctggaagctatcagcagcgccggcgtgtacgccgaaaacagcaacatgatcaacagcgggacagcatcagagatcgtagtgaaaaagaaggcgtccgtgggcatctacgcccgcgaaacaagcatcagctctgtgccaaagaacgtgaaaaacgaggggaaaatcgagataaaagccgacggcgacgggaaatccgccggcatctactcgaagaaggagggcggcgccaaactgaccatcgaaaacacggggaacatcgaggtcgctcaaaaagcatcggccggcatctacgcgaaaaacgaatctaaccaggccaacacagagtctgtcgtgaccaacagcggcttaatcaagatgagcgccgagaacagcatcggcatcatgggcgaaaagagcaaggtagaaaactcaggtaccggaacaaaggggatcgagatcgccggaaaaaagagcgcaggcatcctggtgacaaaggaatctgaagtggtgaactccggcaggatccttctggccaacaactcaatcctggcgagctctgacggcctcgttggcatcagcgttgacggcagcagcacgggcgagaacgacgcctcaggagagatcaagatcgacgccgcctactctacaggaatgctctcttctggaggcgacatcaccaacgcaggaaaaatcgacctggaaaaaaaggaatctataggcatctacgccacaaacgccaacgtgacaaacaacggggctaccacgaaaggcatcttcatcaaggacgaaaagagcgttggcatctacagcaagatcaacagctctagcacggccgacaagatcgtcacaaactctggtaccatcgacataggcggaacaagcaagaccgggtccgcgggcatctactctatcgtggagaacggagctactaagagactgagcacggtatcctcggggaacatcaccatctctcagaaggagtcagtgggtatctacgccaagaacaaatcaagccaggccaacatcgagtctgttgttacaaactcagggaacggcaagatcgaggtcaagaacgagggctctgccggcatcctggtggaaaagagcaaggttaccaacacagctgtaggcaccaacggcataatcgtgagcgccaagaagtctgccggaataatcgggaagctgggcagcgaaatcatcaactcaggcataatcaagactgaaacagccacaccaacggccgccgccgacggtgtcggcggaggctctggaggagggtccggagggggctcagaaagccaggtgcggcagcagttcagcaaagatatcattaagctgctgaacgagcaagtgaacaaggaaatgaacagcagcaacctgtacatgtctatgagctcttggtgctacacccacagcctggacggcgccggcctgttcctgttcgaccacgccgctgaagaatacgagcacgctaaaaagctgatcatcttcctgaacgaaaacaacgtgcccgtgcagctgaccagcatctccgcccctgagcacaagttcgagggcctcacccagatcttccagaaggcctacgagcacgaacaacacatcagcgagagcatcaacaacatcgtggaccacgccatcaagtccaaggaccacgccacattcaacttcctgcagtggtacgtcgccgagcagcacgaggaagaggtgctgttcaaggacatcctggacaagatcgagctgatcggaaacgagaaccacggcctgtacctggccgaccagtacgtgaagggcatcgccaaaagcagaaagagctgatga

SEQ ID NO: 94 - DNA, 3954 bp, Fusobacterium nucleatum
  source 1..3954: mol_type = other DNA
atggaaacagacacattgctgctatgggtcctgctgctctgggttccaggctccactggtgacgaatctagcgagaagcacaacagccaccagggctggaaggccagctggtccaagaccatcaacgtgacagagctgaccaaccggaactacgtgtccctgacaagagacaccgctgactcgaccatcccaacagaccaggtgataaacgtgaccaaagagaacaacagagccatggtggttgacgaggtgagaaagaacgggatcgtagtggacttcaagggcaccatcaacctgcagagaagccagaacgtgggcatcgacctgcaaggtacacaccagggcagcaagagcgacccactgatcgccaacatctacaactccggaaagatcatcggcaacgccaaatacggaagcacggccaacaaggagcagatcgccttcggattcaacaacgccgacggctccaacaacacgaccatgaccaacatggtgaacaaaggagagataacactgaacgcgccttcctccgccggtatccaactgaagcctgaagacccccacgactggcagcctaactcttggaacgccgcgccactgcaaatcgacaacaagacgcccaacaaaatcaagggcagagtgctgatgaaggctgacaaccagaaagacataaacctgaacggctcaggcagcttcggcatggtcaccgtgttcaacgagggcgtacccaagagactgttcgcacccagctacgtaacaaactacgagaacttgcggtccgagcggacatacgacggcgagagagtgctgccaggcggcgagatcggccggagcgctctgtctgactctaaatacacatccggcgtgtacaacaccggcaacatcaacatcaacggtgacagctctatcggcgtgggcctgctgcaggagatacaggaggtgaagctcgccgggaacatcaacataggcaccaaggctgttacacaggagactggcatcagcaacctgcccaacgccgggtcgaaaacctacagcatcaacaaggtcgaagaggccgtgggagtgttcgccggcgtccctacgatgcctgtgaagcctggcgagacagacaccctgatcaacggctctggcgcaagaaacacagccacttccttggtgggcaccgagacagtggagatcaacggaaacatcagcctcggcgagcacgcgacccagtcaatcggcgccctggtgggcgacacggaagtggacctcaacaagggtcagctgaccgagaacggcgtaaacaaaggctctaacgccgacagaaagctgaagagaagcggggacatcacagcaaagagcaacagcatcatcaacgtgggcggaaaaaagaactacggattcgtggtgtctaactcagcccacagcagcaagttcggcacaaccgtggacagcctcgagtacaaggtggacaaaacccaccacggaaaaggcatcaacgaaggcaaaatcaacgtaacgggcgacgagtccgttggtttcgccatgatcaagggaggcgacagcaagagcagcggcatcatctctgtaggcaacaacgcggagaactccatcggcttctacggcaaggaggactccttcaccaacagcgggacaatagaggtgacgagcgcaaagaagaagaacaaggccgtagtgctggacgggacaaacgcttctaacaagatcaacttcaccaacaccggtaacatatacgtcaacactagcgacaacggaaacaagaacttggacggggacggcaacatcggtatctacgcccaaggtaactacaaaatcgagcacaacagcggcatcgtcaaggccggaaaggacgccatcgccttctacgtgaaaaactcaacaggagaagtgaacatcaacgcccctatcgagctggctaacagcaacaaggcaactactatcgggatctacagcgacggcgacgccaaggtaaaattcggggccagctcctcacttaagatcggggaaaaggctgtggggctctacagcgccgaccccacaaagttcaacaacacattcgaaatcgaaaccggcaagacactgaacgtggagctaggtaagaacagcacattcggccttctgaacggcaacaaaaacgttactaactccccactgctgtcaaagtacctgaacaacaacaccacggacaagatcaacatcaccaagttcgacgaaggcgcctccctgttctacgccacactgaaggccaaggccatcctggacgaggactacaaggtgacaaacgctgacgccgctagcacctctgtcctagtggccaacgacggggccaacgtggagatcgccagcgggaagaagctggaaaccaacacaaacgtgggcctggtggccaccaagggggctggcgcctctctgagcacctcagttgcggaaaacaaggggacccttatctctactcggacagacaagggcatcggcatctacacgtacacagccaacggtgagaacagcggaaccatcatcatgaaaaaccagaactccgttgggatactgggctccggaggatccaacctgaagaacacagggaagatcgagctggaagctatcagcagcgccggcgtgtacgccgaaaacagcaacatgatcaacagcgggacagcatcagagatcgtagtgaaaaagaaggcgtccgtgggcatctacgcccgcgaaacaagcatcagctctgtgccaaagaacgtgaaaaacgaggggaaaatcgagataaaagccgacggcgacgggaaatccgccggcatctactcgaagaaggagggcggcgccaaactgaccatcgaaaacacggggaacatcgaggtcgctcaaaaagcatcggccggcatctacgcgaaaaacgaatctaaccaggccaacacagagtctgtcgtgaccaacagcggcttaatcaagatgagcgccgagaacagcatcggcatcatgggcgaaaagagcaaggtagaaaactcaggtaccggaacaaaggggatcgagatcgccggaaaaaagagcgcaggcatcctggtgacaaaggaatctgaagtggtgaactccggcaggatccttctggccaacaactcaatcctggcgagctctgacggcctcgttggcatcagcgttgacggcagcagcacgggcgagaacgacgcctcaggagagatcaagatcgacgccgcctactctacaggaatgctctcttctggaggcgacatcaccaacgcaggaaaaatcgacctggaaaaaaaggaatctataggcatctacgccacaaacgccaacgtgacaaacaacggggctaccacgaaaggcatcttcatcaaggacgaaaagagcgttggcatctacagcaagatcaacagctctagcacggccgacaagatcgtcacaaactctggtaccatcgacataggcggaacaagcaagaccgggtccgcgggcatctactctatcgtggagaacggagctactaagagactgagcacggtatcctcggggaacatcaccatctctcagaaggagtcagtgggtatctacgccaagaacaaatcaagccaggccaacatcgagtctgttgttacaaactcagggaacggcaagatcgaggtcaagaacgagggctctgccggcatcctggtggaaaagagcaaggttaccaacacagctgtaggcaccaacggcataatcgtgagcgccaagaagtctgccggaataatcgggaagctgggcagcgaaatcatcaactcaggcataatcaagactgaaacagccacaccaacggccgccgccgacggtgtcggcggaggctctggaggagggtccggagggggctcaggctacatccccgaggcccctagagatggccaggcctacgtgcggaaggacggagaatgggtgctgctgagcaccttcctgtgatga

SEQ ID NO: 95 - DNA, 4488 bp, Fusobacterium nucleatum
  source 1..4488: mol_type = other DNA
atggaaacagacacattgctgctatgggtcctgctgctctgggttccaggctccactggtgacgaatctagcgagaagcacaacagccaccagggctggaaggccagctggtccaagaccatcaacgtgacagagctgaccaaccggaactacgtgtccctgacaagagacaccgctgactcgaccatcccaacagaccaggtgataaacgtgaccaaagagaacaacagagccatggtggttgacgaggtgagaaagaacgggatcgtagtggacttcaagggcaccatcaacctgcagagaagccagaacgtgggcatcgacctgcaaggtacacaccagggcagcaagagcgacccactgatcgccaacatctacaactccggaaagatcatcggcaacgccaaatacggaagcacggccaacaaggagcagatcgccttcggattcaacaacgccgacggctccaacaacacgaccatgaccaacatggtgaacaaaggagagataacactgaacgcgccttcctccgccggtatccaactgaagcctgaagacccccacgactggcagcctaactcttggaacgccgcgccactgcaaatcgacaacaagacgcccaacaaaatcaagggcagagtgctgatgaaggctgacaaccagaaagacataaacctgaacggctcaggcagcttcggcatggtcaccgtgttcaacgagggcgtacccaagagactgttcgcacccagctacgtaacaaactacgagaacttgcggtccgagcggacatacgacggcgagagagtgctgccaggcggcgagatcggccggagcgctctgtctgactctaaatacacatccggcgtgtacaacaccggcaacatcaacatcaacggtgacagctctatcggcgtgggcctgctgcaggagatacaggaggtgaagctcgccgggaacatcaacataggcaccaaggctgttacacaggagactggcatcagcaacctgcccaacgccgggtcgaaaacctacagcatcaacaaggtcgaagaggccgtgggagtgttcgccggcgtccctacgatgcctgtgaagcctggcgagacagacaccctgatcaacggctctggcgcaagaaacacagccacttccttggtgggcaccgagacagtggagatcaacggaaacatcagcctcggcgagcacgcgacccagtcaatcggcgccctggtgggcgacacggaagtggacctcaacaagggtcagctgaccgagaacggcgtaaacaaaggctctaacgccgacagaaagctgaagagaagcggggacatcacagcaaagagcaacagcatcatcaacgtgggcggaaaaaagaactacggattcgtggtgtctaactcagcccacagcagcaagttcggcacaaccgtggacagcctcgagtacaaggtggacaaaacccaccacggaaaaggcatcaacgaaggcaaaatcaacgtaacgggcgacgagtccgttggtttcgccatgatcaagggaggcgacagcaagagcagcggcatcatctctgtaggcaacaacgcggagaactccatcggcttctacggcaaggaggactccttcaccaacagcgggacaatagaggtgacgagcgcaaagaagaagaacaaggccgtagtgctggacgggacaaacgcttctaacaagatcaacttcaccaacaccggtaacatatacgtcaacactagcgacaacggaaacaagaacttggacggggacggcaacatcggtatctacgcccaaggtaactacaaaatcgagcacaacagcggcatcgtcaaggccggaaaggacgccatcgccttctacgtgaaaaactcaacaggagaagtgaacatcaacgcccctatcgagctggctaacagcaacaaggcaactactatcgggatctacagcgacggcgacgccaaggtaaaattcggggccagctcctcacttaagatcggggaaaaggctgtggggctctacagcgccgaccccacaaagttcaacaacacattcgaaatcgaaaccggcaagacactgaacgtggagctaggtaagaacagcacattcggccttctgaacggcaacaaaaacgttactaactccccactgctgtcaaagtacctgaacaacaacaccacggacaagatcaacatcaccaagttcgacgaaggcgcctccctgttctacgccacactgaaggccaaggccatcctggacgaggactacaaggtgacaaacgctgacgccgctagcacctctgtcctagtggccaacgacggggccaacgtggagatcgccagcgggaagaagctggaaaccaacacaaacgtgggcctggtggccaccaagggggctggcgcctctctgagcacctcagttgcggaaaacaaggggacccttatctctactcggacagacaagggcatcggcatctacacgtacacagccaacggtgagaacagcggaaccatcatcatgaaaaaccagaactccgttgggatactgggctccggaggatccaacctgaagaacacagggaagatcgagctggaagctatcagcagcgccggcgtgtacgccgaaaacagcaacatgatcaacagcgggacagcatcagagatcgtagtgaaaaagaaggcgtccgtgggcatctacgcccgcgaaacaagcatcagctctgtgccaaagaacgtgaaaaacgaggggaaaatcgagataaaagccgacggcgacgggaaatccgccggcatctactcgaagaaggagggcggcgccaaactgaccatcgaaaacacggggaacatcgaggtcgctcaaaaagcatcggccggcatctacgcgaaaaacgaatctaaccaggccaacacagagtctgtcgtgaccaacagcggcttaatcaagatgagcgccgagaacagcatcggcatcatgggcgaaaagagcaaggtagaaaactcaggtaccggaacaaaggggatcgagatcgccggaaaaaagagcgcaggcatcctggtgacaaaggaatctgaagtggtgaactccggcaggatccttctggccaacaactcaatcctggcgagctctgacggcctcgttggcatcagcgttgacggcagcagcacgggcgagaacgacgcctcaggagagatcaagatcgacgccgcctactctacaggaatgctctcttctggaggcgacatcaccaacgcaggaaaaatcgacctggaaaaaaaggaatctataggcatctacgccacaaacgccaacgtgacaaacaacggggctaccacgaaaggcatcttcatcaaggacgaaaagagcgttggcatctacagcaagatcaacagctctagcacggccgacaagatcgtcacaaactctggtaccatcgacataggcggaacaagcaagaccgggtccgcgggcatctactctatcgtggagaacggagctactaagagactgagcacggtatcctcggggaacatcaccatctctcagaaggagtcagtgggtatctacgccaagaacaaatcaagccaggccaacatcgagtctgttgttacaaactcagggaacggcaagatcgaggtcaagaacgagggctctgccggcatcctggtggaaaagagcaaggttaccaacacagctgtaggcaccaacggcataatcgtgagcgccaagaagtctgccggaataatcgggaagctgggcagcgaaatcatcaactcaggcataatcaagactgaaacagccacaccaacggccgccgccgacggtgtcggcggaggctctggaggagggtccggagggggctcaatgaagatggaggagctgttcaagaagcacaagatcgtggccgtgctgagagccaacagcgtggaagaagccaagaaaaaggctctggccgtgttcctgggaggcgtgcacctgatcgagatcacattcaccgtgcccgacgccgacaccgtgatcaaggagctctctttcctgaaagagatgggcgccatcatcggcgccggcaccgtgacaagcgtggagcaggccagaaaggccgtcgagagcggcgctgaattcatcgtgtcccctcacctggacgaggaaatcagccagttcgccaaggagaagggcgtgttctacatgcctggcgtgatgacccctacagagctggtcaaggccatgaaactgggccacaccatcctgaagctgttccccggcgaggtggtgggcccccagttcgtgaaggctatgaaaggacctttccctaacgtgaagttcgtgccaaccggcggcgtgaacctggacaacgtttgcgaatggttcaaggccggagttctggccgtgggcgtcggatctgccctggtgaagggcacacctgtggaagtggccgagaaagctaaggccttcgtggaaaagatccggggctgcaccgagtgatga

SEQ ID NO: 96 - DNA, 4035 bp, Fusobacterium nucleatum
  source 1..4035: mol_type = other DNA
atggaaacagacacattgctgctatgggtcctgctgctctgggttccaggctccactggtgacgaatctagcgagaagcacaacagccaccagggctggaaggccagctggtccaagaccatcaacgtgacagagctgaccaaccggaactacgtgtccctgacaagagacaccgctgactcgaccatcccaacagaccaggtgataaacgtgaccaaagagaacaacagagccatggtggttgacgaggtgagaaagaacgggatcgtagtggacttcaagggcaccatcaacctgcagagaagccagaacgtgggcatcgacctgcaaggtacacaccagggcagcaagagcgacccactgatcgccaacatctacaactccggaaagatcatcggcaacgccaaatacggaagcacggccaacaaggagcagatcgccttcggattcaacaacgccgacggctccaacaacacgaccatgaccaacatggtgaacaaaggagagataacactgaacgcgccttcctccgccggtatccaactgaagcctgaagacccccacgactggcagcctaactcttggaacgccgcgccactgcaaatcgacaacaagacgcccaacaaaatcaagggcagagtgctgatgaaggctgacaaccagaaagacataaacctgaacggctcaggcagcttcggcatggtcaccgtgttcaacgagggcgtacccaagagactgttcgcacccagctacgtaacaaactacgagaacttgcggtccgagcggacatacgacggcgagagagtgctgccaggcggcgagatcggccggagcgctctgtctgactctaaatacacatccggcgtgtacaacaccggcaacatcaacatcaacggtgacagctctatcggcgtgggcctgctgcaggagatacaggaggtgaagctcgccgggaacatcaacataggcaccaaggctgttacacaggagactggcatcagcaacctgcccaacgccgggtcgaaaacctacagcatcaacaaggtcgaagaggccgtgggagtgttcgccggcgtccctacgatgcctgtgaagcctggcgagacagacaccctgatcaacggctctggcgcaagaaacacagccacttccttggtgggcaccgagacagtggagatcaacggaaacatcagcctcggcgagcacgcgacccagtcaatcggcgccctggtgggcgacacggaagtggacctcaacaagggtcagctgaccgagaacggcgtaaacaaaggctctaacgccgacagaaagctgaagagaagcggggacatcacagcaaagagcaacagcatcatcaacgtgggcggaaaaaagaactacggattcgtggtgtctaactcagcccacagcagcaagttcggcacaaccgtggacagcctcgagtacaaggtggacaaaacccaccacggaaaaggcatcaacgaaggcaaaatcaacgtaacgggcgacgagtccgttggtttcgccatgatcaagggaggcgacagcaagagcagcggcatcatctctgtaggcaacaacgcggagaactccatcggcttctacggcaaggaggactccttcaccaacagcgggacaatagaggtgacgagcgcaaagaagaagaacaaggccgtagtgctggacgggacaaacgcttctaacaagatcaacttcaccaacaccggtaacatatacgtcaacactagcgacaacggaaacaagaacttggacggggacggcaacatcggtatctacgcccaaggtaactacaaaatcgagcacaacagcggcatcgtcaaggccggaaaggacgccatcgccttctacgtgaaaaactcaacaggagaagtgaacatcaacgcccctatcgagctggctaacagcaacaaggcaactactatcgggatctacagcgacggcgacgccaaggtaaaattcggggccagctcctcacttaagatcggggaaaaggctgtggggctctacagcgccgaccccacaaagttcaacaacacattcgaaatcgaaaccggcaagacactgaacgtggagctaggtaagaacagcacattcggccttctgaacggcaacaaaaacgttactaactccccactgctgtcaaagtacctgaacaacaacaccacggacaagatcaacatcaccaagttcgacgaaggcgcctccctgttctacgccacactgaaggccaaggccatcctggacgaggactacaaggtgacaaacgctgacgccgctagcacctctgtcctagtggccaacgacggggccaacgtggagatcgccagcgggaagaagctggaaaccaacacaaacgtgggcctggtggccaccaagggggctggcgcctctctgagcacctcagttgcggaaaacaaggggacccttatctctactcggacagacaagggcatcggcatctacacgtacacagccaacggtgagaacagcggaaccatcatcatgaaaaaccagaactccgttgggatactgggctccggaggatccaacctgaagaacacagggaagatcgagctggaagctatcagcagcgccggcgtgtacgccgaaaacagcaacatgatcaacagcgggacagcatcagagatcgtagtgaaaaagaaggcgtccgtgggcatctacgcccgcgaaacaagcatcagctctgtgccaaagaacgtgaaaaacgaggggaaaatcgagataaaagccgacggcgacgggaaatccgccggcatctactcgaagaaggagggcggcgccaaactgaccatcgaaaacacggggaacatcgaggtcgctcaaaaagcatcggccggcatctacgcgaaaaacgaatctaaccaggccaacacagagtctgtcgtgaccaacagcggcttaatcaagatgagcgccgagaacagcatcggcatcatgggcgaaaagagcaaggtagaaaactcaggtaccggaacaaaggggatcgagatcgccggaaaaaagagcgcaggcatcctggtgacaaaggaatctgaagtggtgaactccggcaggatccttctggccaacaactcaatcctggcgagctctgacggcctcgttggcatcagcgttgacggcagcagcacgggcgagaacgacgcctcaggagagatcaagatcgacgccgcctactctacaggaatgctctcttctggaggcgacatcaccaacgcaggaaaaatcgacctggaaaaaaaggaatctataggcatctacgccacaaacgccaacgtgacaaacaacggggctaccacgaaaggcatcttcatcaaggacgaaaagagcgttggcatctacagcaagatcaacagctctagcacggccgacaagatcgtcacaaactctggtaccatcgacataggcggaacaagcaagaccgggtccgcgggcatctactctatcgtggagaacggagctactaagagactgagcacggtatcctcggggaacatcaccatctctcagaaggagtcagtgggtatctacgccaagaacaaatcaagccaggccaacatcgagtctgttgttacaaactcagggaacggcaagatcgaggtcaagaacgagggctctgccggcatcctggtggaaaagagcaaggttaccaacacagctgtaggcaccaacggcataatcgtgagcgccaagaagtctgccggaataatcgggaagctgggcagcgaaatcatcaactcaggcataatcaagactgaaacagccacaccaacggccgccgccgacggtgtcggcggaggctctgctgtgggccaggacacgcaggaggtcatcgtggtgccacactccttgccctttaaggtggtggtcatcagcgccatcctggccctggtggtgctgaccatcatctctctgatcatcctgatcatgctgtggcagaaaaagcctagaggcggaggctctgcctggtcccacccccaattcgagaagtgatga

SEQ ID NO: 97 - protein, 743 aa, Fusobacterium nucleatum
METDTLLLWVLLLWVPGSTGDESSEKHNSHQGWKASWSKTINVTELTNRNYVSLTRDTADSTIPTDQVINVTKENNRAMVVDEVRKNGIVVDFKGTINLQRSQNVGIDLQGTHQGSKSDPLIANIYNSGKIIGNAKYGSTANKEQIAFGFNNADGSNNTTMTNMVNKGEITLNAPSSAGIQLKPEDPHDWQPNSWNAAPLQIDNKTPNKIKGRVLMKADNQKDINLNGSGSFGMVTVFNEGVPKRLFAPSYVTNYENLRSERTYDGERVLPGGEIGRSALSDSKYTSGVYNTGNININGDSSIGVGLLQEIQEVKLAGNINIGTKAVTQETGISNLPNAGSKTYSINKVEEAVGVFAGVPTMPVKPGETDTLINGSGARNTATSLVGTETVEINGNISLGEHATQSIGALVGDTEVDLNKGQLTENGVNKGSNADRKLKRSGDITAKSNSIINVGGKKNYGFVVSNSAHSSKFGTTVDSLEYKVDKTHHGKGINEGKINVTGDESVGFAMIKGGDSKSSGIISVGNNAENSIGFYGKEDSFTNSGTIEVTSAKKKNKAVVLDGTNASNKINFTNTGNIYVNTSDNGNKNLDGDGNIGIYAQGNYKIEHNSGIVKAGKDAIAFYVKNSTGEVNINAPIELANSNKATTIGIYSDGDAKVKFGASSSLKIGEKAVGLYSADPTKFNNTFEIETGKTLNVELGKNSTFGLLNGNKNVTNSPLLSKYLNNNTTDGGGSAWSHPQFEK

SEQ ID NO: 98 - protein, 873 aa, Fusobacterium nucleatum
METDTLLLWVLLLWVPGSTGDESSEKHNSHQGWKASWSKTINVTELTNRNYVSLTRDTADSTIPTDQVINVTKENNRAMVVDEVRKNGIVVDFKGTINLQRSQNVGIDLQGTHQGSKSDPLIANIYNSGKIIGNAKYGSTANKEQIAFGFNNADGSNNTTMTNMVNKGEITLNAPSSAGIQLKPEDPHDWQPNSWNAAPLQIDNKTPNKIKGRVLMKADNQKDINLNGSGSFGMVTVFNEGVPKRLFAPSYVTNYENLRSERTYDGERVLPGGEIGRSALSDSKYTSGVYNTGNININGDSSIGVGLLQEIQEVKLAGNINIGTKAVTQETGISNLPNAGSKTYSINKVEEAVGVFAGVPTMPVKPGETDTLINGSGARNTATSLVGTETVEINGNISLGEHATQSIGALVGDTEVDLNKGQLTENGVNKGSNADRKLKRSGDITAKSNSIINVGGKKNYGFVVSNSAHSSKFGTTVDSLEYKVDKTHHGKGINEGKINVTGDESVGFAMIKGGDSKSSGIISVGNNAENSIGFYGKEDSFTNSGTIEVTSAKKKNKAVVLDGTNASNKINFTNTGNIYVNTSDNGNKNLDGDGNIGIYAQGNYKIEHNSGIVKAGKDAIAFYVKNSTGEVNINAPIELANSNKATTIGIYSDGDAKVKFGASSSLKIGEKAVGLYSADPTKFNNTFEIETGKTLNVELGKNSTFGLLNGNKNVTNSPLLSKYLNNNTTDGGGSGGGSGGGSMANKPMQPITSTANKIVWSDPTRLSTTFSASLLRQRVKVGIAELNNVSGQYVSVYKRPAPKPEGCADACVIMPNENQSIRTVISGSAENLATLKAEWETHKRNVDTLFASGNAGLGFLDPTAAIVSSDTTA

SEQ ID NO: 99 - protein, 817 aa, Fusobacterium nucleatum
METDTLLLWVLLLWVPGSTGDESSEKHNSHQGWKASWSKTINVTELTNRNYVSLTRDTADSTIPTDQVINVTKENNRAMVVDEVRKNGIVVDFKGTINLQRSQNVGIDLQGTHQGSKSDPLIANIYNSGKIIGNAKYGSTANKEQIAFGFNNADGSNNTTMTNMVNKGEITLNAPSSAGIQLKPEDPHDWQPNSWNAAPLQIDNKTPNKIKGRVLMKADNQKDINLNGSGSFGMVTVFNEGVPKRLFAPSYVTNYENLRSERTYDGERVLPGGEIGRSALSDSKYTSGVYNTGNININGDSSIGVGLLQEIQEVKLAGNINIGTKAVTQETGISNLPNAGSKTYSINKVEEAVGVFAGVPTMPVKPGETDTLINGSGARNTATSLVGTETVEINGNISLGEHATQSIGALVGDTEVDLNKGQLTENGVNKGSNADRKLKRSGDITAKSNSIINVGGKKNYGFVVSNSAHSSKFGTTVDSLEYKVDKTHHGKGINEGKINVTGDESVGFAMIKGGDSKSSGIISVGNNAENSIGFYGKEDSFTNSGTIEVTSAKKKNKAVVLDGTNASNKINFTNTGNIYVNTSDNGNKNLDGDGNIGIYAQGNYKIEHNSGIVKAGKDAIAFYVKNSTGEVNINAPIELANSNKATTIGIYSDGDAKVKFGASSSLKIGEKAVGLYSADPTKFNNTFEIETGKTLNVELGKNSTFGLLNGNKNVTNSPLLSKYLNNNTTDGGGSPPEDPPDSKNTLVLFGAGFGAVITVVVIVVIIKCFCKHRSCFRRNEASRETNNSLTFGPEEALAEQTVFLGGGSAWSHPQFEK

SEQ ID NO: 100 - protein, 996 aa, Fusobacterium nucleatum
METDTLLLWVLLLWVPGSTGDESSEKHNSHQGWKASWSKTINVTELTNRNYVSLTRDTADSTIPTDQVINVTKENNRAMVVDEVRKNGIVVDFKGTINLQRSQNVGIDLQGTHQGSKSDPLIANIYNSGKIIGNAKYGSTANKEQIAFGFNNADGSNNTTMTNMVNKGEITLNAPSSAGIQLKPEDPHDWQPNSWNAAPLQIDNKTPNKIKGRVLMKADNQKDINLNGSGSFGMVTVFNEGVPKRLFAPSYVTNYENLRSERTYDGERVLPGGEIGRSALSDSKYTSGVYNTGNININGDSSIGVGLLQEIQEVKLAGNINIGTKAVTQETGISNLPNAGSKTYSINKVEEAVGVFAGVPTMPVKPGETDTLINGSGARNTATSLVGTETVEINGNISLGEHATQSIGALVGDTEVDLNKGQLTENGVNKGSNADRKLKRSGDITAKSNSIINVGGKKNYGFVVSNSAHSSKFGTTVDSLEYKVDKTHHGKGINEGKINVTGDESVGFAMIKGGDSKSSGIISVGNNAENSIGFYGKEDSFTNSGTIEVTSAKKKNKAVVLDGTNASNKINFTNTGNIYVNTSDNGNKNLDGDGNIGIYAQGNYKIEHNSGIVKAGKDAIAFYVKNSTGEVNINAPIELANSNKATTIGIYSDGDAKVKFGASSSLKIGEKAVGLYSADPTKFNNTFEIETGKTLNVELGKNSTFGLLNGNKNVTNSPLLSKYLNNNTTDGGGSGGGSGGGSPAAAEEKAAPAAAKPATTEGEFPETREKMSGIRRAIAKAMVHSKHTAPHVTLMDEADVTKLVAHRKKFKAIAAEKGIKLTFLPYVVKALVSALREYPVLNTSIDDETEEIIQKHYYNIGIAADTDRGLLVPVIKHADRKPIFALAQEINELAEKARDGKLTPGEMKGASCTITNIGSAGGQWFTPVINHPEVAILGIGRIAEKPIVRDGEIVAAPMLALSLSFDHRMIDGATAQKALNHIKRLLSDPELLLMEA

SEQ ID NO: 101 - protein, 915 aa, Fusobacterium nucleatum
METDTLLLWVLLLWVPGSTGDESSEKHNSHQGWKASWSKTINVTELTNRNYVSLTRDTADSTIPTDQVINVTKENNRAMVVDEVRKNGIVVDFKGTINLQRSQNVGIDLQGTHQGSKSDPLIANIYNSGKIIGNAKYGSTANKEQIAFGFNNADGSNNTTMTNMVNKGEITLNAPSSAGIQLKPEDPHDWQPNSWNAAPLQIDNKTPNKIKGRVLMKADNQKDINLNGSGSFGMVTVFNEGVPKRLFAPSYVTNYENLRSERTYDGERVLPGGEIGRSALSDSKYTSGVYNTGNININGDSSIGVGLLQEIQEVKLAGNINIGTKAVTQETGISNLPNAGSKTYSINKVEEAVGVFAGVPTMPVKPGETDTLINGSGARNTATSLVGTETVEINGNISLGEHATQSIGALVGDTEVDLNKGQLTENGVNKGSNADRKLKRSGDITAKSNSIINVGGKKNYGFVVSNSAHSSKFGTTVDSLEYKVDKTHHGKGINEGKINVTGDESVGFAMIKGGDSKSSGIISVGNNAENSIGFYGKEDSFTNSGTIEVTSAKKKNKAVVLDGTNASNKINFTNTGNIYVNTSDNGNKNLDGDGNIGIYAQGNYKIEHNSGIVKAGKDAIAFYVKNSTGEVNINAPIELANSNKATTIGIYSDGDAKVKFGASSSLKIGEKAVGLYSADPTKFNNTFEIETGKTLNVELGKNSTFGLLNGNKNVTNSPLLSKYLNNNTTDGGGSGGGSGGGSESQVRQQFSKDIIKLLNEQVNKEMNSSNLYMSMSSWCYTHSLDGAGLFLFDHAAEEYEHAKKLIIFLNENNVPVQLTSISAPEHKFEGLTQIFQKAYEHEQHISESINNIVDHAIKSKDHATFNFLQWYVAEQHEEEVLFKDILDKIELIGNENHGLYLADQYVKGIAKSRKS

SEQ ID NO: 102 - protein, 769 aa, Fusobacterium nucleatum
METDTLLLWVLLLWVPGSTGDESSEKHNSHQGWKASWSKTINVTELTNRNYVSLTRDTADSTIPTDQVINVTKENNRAMVVDEVRKNGIVVDFKGTINLQRSQNVGIDLQGTHQGSKSDPLIANIYNSGKIIGNAKYGSTANKEQIAFGFNNADGSNNTTMTNMVNKGEITLNAPSSAGIQLKPEDPHDWQPNSWNAAPLQIDNKTPNKIKGRVLMKADNQKDINLNGSGSFGMVTVFNEGVPKRLFAPSYVTNYENLRSERTYDGERVLPGGEIGRSALSDSKYTSGVYNTGNININGDSSIGVGLLQEIQEVKLAGNINIGTKAVTQETGISNLPNAGSKTYSINKVEEAVGVFAGVPTMPVKPGETDTLINGSGARNTATSLVGTETVEINGNISLGEHATQSIGALVGDTEVDLNKGQLTENGVNKGSNADRKLKRSGDITAKSNSIINVGGKKNYGFVVSNSAHSSKFGTTVDSLEYKVDKTHHGKGINEGKINVTGDESVGFAMIKGGDSKSSGIISVGNNAENSIGFYGKEDSFTNSGTIEVTSAKKKNKAVVLDGTNASNKINFTNTGNIYVNTSDNGNKNLDGDGNIGIYAQGNYKIEHNSGIVKAGKDAIAFYVKNSTGEVNINAPIELANSNKATTIGIYSDGDAKVKFGASSSLKIGEKAVGLYSADPTKFNNTFEIETGKTLNVELGKNSTFGLLNGNKNVTNSPLLSKYLNNNTTDGGGSGGGSGGGSGYIPEAPRDGQAYVRKDGEWVLLSTFL

SEQ ID NO: 103 - protein, 947 aa, Fusobacterium nucleatum
METDTLLLWVLLLWVPGSTGDESSEKHNSHQGWKASWSKTINVTELTNRNYVSLTRDTADSTIPTDQVINVTKENNRAMVVDEVRKNGIVVDFKGTINLQRSQNVGIDLQGTHQGSKSDPLIANIYNSGKIIGNAKYGSTANKEQIAFGFNNADGSNNTTMTNMVNKGEITLNAPSSAGIQLKPEDPHDWQPNSWNAAPLQIDNKTPNKIKGRVLMKADNQKDINLNGSGSFGMVTVFNEGVPKRLFAPSYVTNYENLRSERTYDGERVLPGGEIGRSALSDSKYTSGVYNTGNININGDSSIGVGLLQEIQEVKLAGNINIGTKAVTQETGISNLPNAGSKTYSINKVEEAVGVFAGVPTMPVKPGETDTLINGSGARNTATSLVGTETVEINGNISLGEHATQSIGALVGDTEVDLNKGQLTENGVNKGSNADRKLKRSGDITAKSNSIINVGGKKNYGFVVSNSAHSSKFGTTVDSLEYKVDKTHHGKGINEGKINVTGDESVGFAMIKGGDSKSSGIISVGNNAENSIGFYGKEDSFTNSGTIEVTSAKKKNKAVVLDGTNASNKINFTNTGNIYVNTSDNGNKNLDGDGNIGIYAQGNYKIEHNSGIVKAGKDAIAFYVKNSTGEVNINAPIELANSNKATTIGIYSDGDAKVKFGASSSLKIGEKAVGLYSADPTKFNNTFEIETGKTLNVELGKNSTFGLLNGNKNVTNSPLLSKYLNNNTTDGGGSGGGSGGGSMKMEELFKKHKIVAVLRANSVEEAKKKALAVFLGGVHLIEITFTVPDADTVIKELSFLKEMGAIIGAGTVTSVEQARKAVESGAEFIVSPHLDEEISQFAKEKGVFYMPGVMTPTELVKAMKLGHTILKLFPGEVVGPQFVKAMKGPFPNVKFVPTGGVNLDNVCEWFKAGVLAVGVGSALVKGTPVEVAEKAKAFVEKIRGCTE

SEQ ID NO: 104 - protein, 796 aa, Fusobacterium nucleatum
METDTLLLWVLLLWVPGSTGDESSEKHNSHQGWKASWSKTINVTELTNRNYVSLTRDTADSTIPTDQVINVTKENNRAMVVDEVRKNGIVVDFKGTINLQRSQNVGIDLQGTHQGSKSDPLIANIYNSGKIIGNAKYGSTANKEQIAFGFNNADGSNNTTMTNMVNKGEITLNAPSSAGIQLKPEDPHDWQPNSWNAAPLQIDNKTPNKIKGRVLMKADNQKDINLNGSGSFGMVTVFNEGVPKRLFAPSYVTNYENLRSERTYDGERVLPGGEIGRSALSDSKYTSGVYNTGNININGDSSIGVGLLQEIQEVKLAGNINIGTKAVTQETGISNLPNAGSKTYSINKVEEAVGVFAGVPTMPVKPGETDTLINGSGARNTATSLVGTETVEINGNISLGEHATQSIGALVGDTEVDLNKGQLTENGVNKGSNADRKLKRSGDITAKSNSIINVGGKKNYGFVVSNSAHSSKFGTTVDSLEYKVDKTHHGKGINEGKINVTGDESVGFAMIKGGDSKSSGIISVGNNAENSIGFYGKEDSFTNSGTIEVTSAKKKNKAVVLDGTNASNKINFTNTGNIYVNTSDNGNKNLDGDGNIGIYAQGNYKIEHNSGIVKAGKDAIAFYVKNSTGEVNINAPIELANSNKATTIGIYSDGDAKVKFGASSSLKIGEKAVGLYSADPTKFNNTFEIETGKTLNVELGKNSTFGLLNGNKNVTNSPLLSKYLNNNTTDGGGSAVGQDTQEVIVVPHSLPFKVVVISAILALVVLTIISLIILIMLWQKKPRGGGSAWSHPQFEK

SEQ ID NO: 105 - protein, 1290 aa, Fusobacterium nucleatum
METDTLLLWVLLLWVPGSTGDESSEKHNSHQGWKASWSKTINVTELTNRNYVSLTRDTADSTIPTDQVINVTKENNRAMVVDEVRKNGIVVDFKGTINLQRSQNVGIDLQGTHQGSKSDPLIANIYNSGKIIGNAKYGSTANKEQIAFGFNNADGSNNTTMTNMVNKGEITLNAPSSAGIQLKPEDPHDWQPNSWNAAPLQIDNKTPNKIKGRVLMKADNQKDINLNGSGSFGMVTVFNEGVPKRLFAPSYVTNYENLRSERTYDGERVLPGGEIGRSALSDSKYTSGVYNTGNININGDSSIGVGLLQEIQEVKLAGNINIGTKAVTQETGISNLPNAGSKTYSINKVEEAVGVFAGVPTMPVKPGETDTLINGSGARNTATSLVGTETVEINGNISLGEHATQSIGALVGDTEVDLNKGQLTENGVNKGSNADRKLKRSGDITAKSNSIINVGGKKNYGFVVSNSAHSSKFGTTVDSLEYKVDKTHHGKGINEGKINVTGDESVGFAMIKGGDSKSSGIISVGNNAENSIGFYGKEDSFTNSGTIEVTSAKKKNKAVVLDGTNASNKINFTNTGNIYVNTSDNGNKNLDGDGNIGIYAQGNYKIEHNSGIVKAGKDAIAFYVKNSTGEVNINAPIELANSNKATTIGIYSDGDAKVKFGASSSLKIGEKAVGLYSADPTKFNNTFEIETGKTLNVELGKNSTFGLLNGNKNVTNSPLLSKYLNNNTTDKINITKFDEGASLFYATLKAKAILDEDYKVTNADAASTSVLVANDGANVEIASGKKLETNTNVGLVATKGAGASLSTSVAENKGTLISTRTDKGIGIYTYTANGENSGTIIMKNQNSVGILGSGGSNLKNTGKIELEAISSAGVYAENSNMINSGTASEIVVKKKASVGIYARETSISSVPKNVKNEGKIEIKADGDGKSAGIYSKKEGGAKLTIENTGNIEVAQKASAGIYAKNESNQANTESVVTNSGLIKMSAENSIGIMGEKSKVENSGTGTKGIEIAGKKSAGILVTKESEVVNSGRILLANNSILASSDGLVGISVDGSSTGENDASGEIKIDAAYSTGMLSSGGDITNAGKIDLEKKESIGIYATNANVTNNGATTKGIFIKDEKSVGIYSKINSSSTADKIVTNSGTIDIGGTSKTGSAGIYSIVENGATKRLSTVSSGNITISQKESVGIYAKNKSSQANIESVVTNSGNGKIEVKNEGSAGILVEKSKVTNTAVGTNGIIVSAKKSAGIIGKLGSEIINSGIIKTETATPTAAADGVGGGSAWSHPQFEK

SEQ ID NO: 106 - protein, 1420 aa, Fusobacterium nucleatum
METDTLLLWVLLLWVPGSTGDESSEKHNSHQGWKASWSKTINVTELTNRNYVSLTRDTADSTIPTDQVINVTKENNRAMVVDEVRKNGIVVDFKGTINLQRSQNVGIDLQGTHQGSKSDPLIANIYNSGKIIGNAKYGSTANKEQIAFGFNNADGSNNTTMTNMVNKGEITLNAPSSAGIQLKPEDPHDWQPNSWNAAPLQIDNKTPNKIKGRVLMKADNQKDINLNGSGSFGMVTVFNEGVPKRLFAPSYVTNYENLRSERTYDGERVLPGGEIGRSALSDSKYTSGVYNTGNININGDSSIGVGLLQEIQEVKLAGNINIGTKAVTQETGISNLPNAGSKTYSINKVEEAVGVFAGVPTMPVKPGETDTLINGSGARNTATSLVGTETVEINGNISLGEHATQSIGALVGDTEVDLNKGQLTENGVNKGSNADRKLKRSGDITAKSNSIINVGGKKNYGFVVSNSAHSSKFGTTVDSLEYKVDKTHHGKGINEGKINVTGDESVGFAMIKGGDSKSSGIISVGNNAENSIGFYGKEDSFTNSGTIEVTSAKKKNKAVVLDGTNASNKINFTNTGNIYVNTSDNGNKNLDGDGNIGIYAQGNYKIEHNSGIVKAGKDAIAFYVKNSTGEVNINAPIELANSNKATTIGIYSDGDAKVKFGASSSLKIGEKAVGLYSADPTKFNNTFEIETGKTLNVELGKNSTFGLLNGNKNVTNSPLLSKYLNNNTTDKINITKFDEGASLFYATLKAKAILDEDYKVTNADAASTSVLVANDGANVEIASGKKLETNTNVGLVATKGAGASLSTSVAENKGTLISTRTDKGIGIYTYTANGENSGTIIMKNQNSVGILGSGGSNLKNTGKIELEAISSAGVYAENSNMINSGTASEIVVKKKASVGIYARETSISSVPKNVKNEGKIEIKADGDGKSAGIYSKKEGGAKLTIENTGNIEVAQKASAGIYAKNESNQANTESVVTNSGLIKMSAENSIGIMGEKSKVENSGTGTKGIEIAGKKSAGILVTKESEVVNSGRILLANNSILASSDGLVGISVDGSSTGENDASGEIKIDAAYSTGMLSSGGDITNAGKIDLEKKESIGIYATNANVTNNGATTKGIFIKDEKSVGIYSKINSSSTADKIVTNSGTIDIGGTSKTGSAGIYSIVENGATKRLSTVSSGNITISQKESVGIYAKNKSSQANIESVVTNSGNGKIEVKNEGSAGILVEKSKVTNTAVGTNGIIVSAKKSAGIIGKLGSEIINSGIIKTETATPTAAADGVGGGSGGGSGGGSMANKPMQPITSTANKIVWSDPTRLSTTFSASLLRQRVKVGIAELNNVSGQYVSVYKRPAPKPEGCADACVIMPNENQSIRTVISGSAENLATLKAEWETHKRNVDTLFASGNAGLGFLDPTAAIVSSDTTA

SEQ ID NO: 107 - protein, 1364 aa, Fusobacterium nucleatum
METDTLLLWVLLLWVPGSTGDESSEKHNSHQGWKASWSKTINVTELTNRNYVSLTRDTADSTIPTDQVINVTKENNRAMVVDEVRKNGIVVDFKGTINLQRSQNVGIDLQGTHQGSKSDPLIANIYNSGKIIGNAKYGSTANKEQIAFGFNNADGSNNTTMTNMVNKGEITLNAPSSAGIQLKPEDPHDWQPNSWNAAPLQIDNKTPNKIKGRVLMKADNQKDINLNGSGSFGMVTVFNEGVPKRLFAPSYVTNYENLRSERTYDGERVLPGGEIGRSALSDSKYTSGVYNTGNININGDSSIGVGLLQEIQEVKLAGNINIGTKAVTQETGISNLPNAGSKTYSINKVEEAVGVFAGVPTMPVKPGETDTLINGSGARNTATSLVGTETVEINGNISLGEHATQSIGALVGDTEVDLNKGQLTENGVNKGSNADRKLKRSGDITAKSNSIINVGGKKNYGFVVSNSAHSSKFGTTVDSLEYKVDKTHHGKGINEGKINVTGDESVGFAMIKGGDSKSSGIISVGNNAENSIGFYGKEDSFTNSGTIEVTSAKKKNKAVVLDGTNASNKINFTNTGNIYVNTSDNGNKNLDGDGNIGIYAQGNYKIEHNSGIVKAGKDAIAFYVKNSTGEVNINAPIELANSNKATTIGIYSDGDAKVKFGASSSLKIGEKAVGLYSADPTKFNNTFEIETGKTLNVELGKNSTFGLLNGNKNVTNSPLLSKYLNNNTTDKINITKFDEGASLFYATLKAKAILDEDYKVTNADAASTSVLVANDGANVEIASGKKLETNTNVGLVATKGAGASLSTSVAENKGTLISTRTDKGIGIYTYTANGENSGTIIMKNQNSVGILGSGGSNLKNTGKIELEAISSAGVYAENSNMINSGTASEIVVKKKASVGIYARETSISSVPKNVKNEGKIEIKADGDGKSAGIYSKKEGGAKLTIENTGNIEVAQKASAGIYAKNESNQANTESVVTNSGLIKMSAENSIGIMGEKSKVENSGTGTKGIEIAGKKSAGILVTKESEVVNSGRILLANNSILASSDGLVGISVDGSSTGENDASGEIKIDAAYSTGMLSSGGDITNAGKIDLEKKESIGIYATNANVTNNGATTKGIFIKDEKSVGIYSKINSSSTADKIVTNSGTIDIGGTSKTGSAGIYSIVENGATKRLSTVSSGNITISQKESVGIYAKNKSSQANIESVVTNSGNGKIEVKNEGSAGILVEKSKVTNTAVGTNGIIVSAKKSAGIIGKLGSEIINSGIIKTETATPTAAADGVGGGSPPEDPPDSKNTLVLFGAGFGAVITVVVIVVIIKCFCKHRSCFRRNEASRETNNSLTFGPEEALAEQTVFLGGGSAWSHPQFEK

SEQ ID NO: 108 - protein, 1543 aa, Fusobacterium nucleatum
METDTLLLWVLLLWVPGSTGDESSEKHNSHQGWKASWSKTINVTELTNRNYVSLTRDTADSTIPTDQVINVTKENNRAMVVDEVRKNGIVVDFKGTINLQRSQNVGIDLQGTHQGSKSDPLIANIYNSGKIIGNAKYGSTANKEQIAFGFNNADGSNNTTMTNMVNKGEITLNAPSSAGIQLKPEDPHDWQPNSWNAAPLQIDNKTPNKIKGRVLMKADNQKDINLNGSGSFGMVTVFNEGVPKRLFAPSYVTNYENLRSERTYDGERVLPGGEIGRSALSDSKYTSGVYNTGNININGDSSIGVGLLQEIQEVKLAGNINIGTKAVTQETGISNLPNAGSKTYSINKVEEAVGVFAGVPTMPVKPGETDTLINGSGARNTATSLVGTETVEINGNISLGEHATQSIGALVGDTEVDLNKGQLTENGVNKGSNADRKLKRSGDITAKSNSIINVGGKKNYGFVVSNSAHSSKFGTTVDSLEYKVDKTHHGKGINEGKINVTGDESVGFAMIKGGDSKSSGIISVGNNAENSIGFYGKEDSFTNSGTIEVTSAKKKNKAVVLDGTNASNKINFTNTGNIYVNTSDNGNKNLDGDGNIGIYAQGNYKIEHNSGIVKAGKDAIAFYVKNSTGEVNINAPIELANSNKATTIGIYSDGDAKVKFGASSSLKIGEKAVGLYSADPTKFNNTFEIETGKTLNVELGKNSTFGLLNGNKNVTNSPLLSKYLNNNTTDKINITKFDEGASLFYATLKAKAILDEDYKVTNADAASTSVLVANDGANVEIASGKKLETNTNVGLVATKGAGASLSTSVAENKGTLISTRTDKGIGIYTYTANGENSGTIIMKNQNSVGILGSGGSNLKNTGKIELEAISSAGVYAENSNMINSGTASEIVVKKKASVGIYARETSISSVPKNVKNEGKIEIKADGDGKSAGIYSKKEGGAKLTIENTGNIEVAQKASAGIYAKNESNQANTESVVTNSGLIKMSAENSIGIMGEKSKVENSGTGTKGIEIAGKKSAGILVTKESEVVNSGRILLANNSILASSDGLVGISVDGSSTGENDASGEIKIDAAYSTGMLSSGGDITNAGKIDLEKKESIGIYATNANVTNNGATTKGIFIKDEKSVGIYSKINSSSTADKIVTNSGTIDIGGTSKTGSAGIYSIVENGATKRLSTVSSGNITISQKESVGIYAKNKSSQANIESVVTNSGNGKIEVKNEGSAGILVEKSKVTNTAVGTNGIIVSAKKSAGIIGKLGSEIINSGIIKTETATPTAAADGVGGGSGGGSGGGSPAAAEEKAAPAAAKPATTEGEFPETREKMSGIRRAIAKAMVHSKHTAPHVTLMDEADVTKLVAHRKKFKAIAAEKGIKLTFLPYVVKALVSALREYPVLNTSIDDETEEIIQKHYYNIGIAADTDRGLLVPVIKHADRKPIFALAQEINELAEKARDGKLTPGEMKGASCTITNIGSAGGQWFTPVINHPEVAILGIGRIAEKPIVRDGEIVAAPMLALSLSFDHRMIDGATAQKALNHIKRLLSDPELLLMEA

SEQ ID NO: 109 - protein, 1462 aa, Fusobacterium nucleatum
METDTLLLWVLLLWVPGSTGDESSEKHNSHQGWKASWSKTINVTELTNRNYVSLTRDTADSTIPTDQVINVTKENNRAMVVDEVRKNGIVVDFKGTINLQRSQNVGIDLQGTHQGSKSDPLIANIYNSGKIIGNAKYGSTANKEQIAFGFNNADGSNNTTMTNMVNKGEITLNAPSSAGIQLKPEDPHDWQPNSWNAAPLQIDNKTPNKIKGRVLMKADNQKDINLNGSGSFGMVTVFNEGVPKRLFAPSYVTNYENLRSERTYDGERVLPGGEIGRSALSDSKYTSGVYNTGNININGDSSIGVGLLQEIQEVKLAGNINIGTKAVTQETGISNLPNAGSKTYSINKVEEAVGVFAGVPTMPVKPGETDTLINGSGARNTATSLVGTETVEINGNISLGEHATQSIGALVGDTEVDLNKGQLTENGVNKGSNADRKLKRSGDITAKSNSIINVGGKKNYGFVVSNSAHSSKFGTTVDSLEYKVDKTHHGKGINEGKINVTGDESVGFAMIKGGDSKSSGIISVGNNAENSIGFYGKEDSFTNSGTIEVTSAKKKNKAVVLDGTNASNKINFTNTGNIYVNTSDNGNKNLDGDGNIGIYAQGNYKIEHNSGIVKAGKDAIAFYVKNSTGEVNINAPIELANSNKATTIGIYSDGDAKVKFGASSSLKIGEKAVGLYSADPTKFNNTFEIETGKTLNVELGKNSTFGLLNGNKNVTNSPLLSKYLNNNTTDKINITKFDEGASLFYATLKAKAILDEDYKVTNADAASTSVLVANDGANVEIASGKKLETNTNVGLVATKGAGASLSTSVAENKGTLISTRTDKGIGIYTYTANGENSGTIIMKNQNSVGILGSGGSNLKNTGKIELEAISSAGVYAENSNMINSGTASEIVVKKKASVGIYARETSISSVPKNVKNEGKIEIKADGDGKSAGIYSKKEGGAKLTIENTGNIEVAQKASAGIYAKNESNQANTESVVTNSGLIKMSAENSIGIMGEKSKVENSGTGTKGIEIAGKKSAGILVTKESEVVNSGRILLANNSILASSDGLVGISVDGSSTGENDASGEIKIDAAYSTGMLSSGGDITNAGKIDLEKKESIGIYATNANVTNNGATTKGIFIKDEKSVGIYSKINSSSTADKIVTNSGTIDIGGTSKTGSAGIYSIVENGATKRLSTVSSGNITISQKESVGIYAKNKSSQANIESVVTNSGNGKIEVKNEGSAGILVEKSKVTNTAVGTNGIIVSAKKSAGIIGKLGSEIINSGIIKTETATPTAAADGVGGGSGGGSGGGSESQVRQQFSKDIIKLLNEQVNKEMNSSNLYMSMSSWCYTHSLDGAGLFLFDHAAEEYEHAKKLIIFLNENNVPVQLTSISAPEHKFEGLTQIFQKAYEHEQHISESINNIVDHAIKSKDHATFNFLQWYVAEQHEEEVLFKDILDKIELIGNENHGLYLADQYVKGIAKSRKS

SEQ ID NO: 110 - protein, 1316 aa, Fusobacterium nucleatum
METDTLLLWVLLLWVPGSTGDESSEKHNSHQGWKASWSKTINVTELTNRNYVSLTRDTADSTIPTDQVINVTKENNRAMVVDEVRKNGIVVDFKGTINLQRSQNVGIDLQGTHQGSKSDPLIANIYNSGKIIGNAKYGSTANKEQIAFGFNNADGSNNTTMTNMVNKGEITLNAPSSAGIQLKPEDPHDWQPNSWNAAPLQIDNKTPNKIKGRVLMKADNQKDINLNGSGSFGMVTVFNEGVPKRLFAPSYVTNYENLRSERTYDGERVLPGGEIGRSALSDSKYTSGVYNTGNININGDSSIGVGLLQEIQEVKLAGNINIGTKAVTQETGISNLPNAGSKTYSINKVEEAVGVFAGVPTMPVKPGETDTLINGSGARNTATSLVGTETVEINGNISLGEHATQSIGALVGDTEVDLNKGQLTENGVNKGSNADRKLKRSGDITAKSNSIINVGGKKNYGFVVSNSAHSSKFGTTVDSLEYKVDKTHHGKGINEGKINVTGDESVGFAMIKGGDSKSSGIISVGNNAENSIGFYGKEDSFTNSGTIEVTSAKKKNKAVVLDGTNASNKINFTNTGNIYVNTSDNGNKNLDGDGNIGIYAQGNYKIEHNSGIVKAGKDAIAFYVKNSTGEVNINAPIELANSNKATTIGIYSDGDAKVKFGASSSLKIGEKAVGLYSADPTKFNNTFEIETGKTLNVELGKNSTFGLLNGNKNVTNSPLLSKYLNNNTTDKINITKFDEGASLFYATLKAKAILDEDYKVTNADAASTSVLVANDGANVEIASGKKLETNTNVGLVATKGAGASLSTSVAENKGTLISTRTDKGIGIYTYTANGENSGTIIMKNQNSVGILGSGGSNLKNTGKIELEAISSAGVYAENSNMINSGTASEIVVKKKASVGIYARETSISSVPKNVKNEGKIEIKADGDGKSAGIYSKKEGGAKLTIENTGNIEVAQKASAGIYAKNESNQANTESVVTNSGLIKMSAENSIGIMGEKSKVENSGTGTKGIEIAGKKSAGILVTKESEVVNSGRILLANNSILASSDGLVGISVDGSSTGENDASGEIKIDAAYSTGMLSSGGDITNAGKIDLEKKESIGIYATNANVTNNGATTKGIFIKDEKSVGIYSKINSSSTADKIVTNSGTIDIGGTSKTGSAGIYSIVENGATKRLSTVSSGNITISQKESVGIYAKNKSSQANIESVVTNSGNGKIEVKNEGSAGILVEKSKVTNTAVGTNGIIVSAKKSAGIIGKLGSEIINSGIIKTETATPTAAADGVGGGSGGGSGGGSGYIPEAPRDGQAYVRKDGEWVLLSTFL

SEQ ID NO: 111 - protein, 1494 aa, Fusobacterium nucleatum
METDTLLLWVLLLWVPGSTGDESSEKHNSHQGWKASWSKTINVTELTNRNYVSLTRDTADSTIPTDQVINVTKENNRAMVVDEVRKNGIVVDFKGTINLQRSQNVGIDLQGTHQGSKSDPLIANIYNSGKIIGNAKYGSTANKEQIAFGFNNADGSNNTTMTNMVNKGEITLNAPSSAGIQLKPEDPHDWQPNSWNAAPLQIDNKTPNKIKGRVLMKADNQKDINLNGSGSFGMVTVFNEGVPKRLFAPSYVTNYENLRSERTYDGERVLPGGEIGRSALSDSKYTSGVYNTGNININGDSSIGVGLLQEIQEVKLAGNINIGTKAVTQETGISNLPNAGSKTYSINKVEEAVGVFAGVPTMPVKPGETDTLINGSGARNTATSLVGTETVEINGNISLGEHATQSIGALVGDTEVDLNKGQLTENGVNKGSNADRKLKRSGDITAKSNSIINVGGKKNYGFVVSNSAHSSKFGTTVDSLEYKVDKTHHGKGINEGKINVTGDESVGFAMIKGGDSKSSGIISVGNNAENSIGFYGKEDSFTNSGTIEVTSAKKKNKAVVLDGTNASNKINFTNTGNIYVNTSDNGNKNLDGDGNIGIYAQGNYKIEHNSGIVKAGKDAIAFYVKNSTGEVNINAPIELANSNKATTIGIYSDGDAKVKFGASSSLKIGEKAVGLYSADPTKFNNTFEIETGKTLNVELGKNSTFGLLNGNKNVTNSPLLSKYLNNNTTDKINITKFDEGASLFYATLKAKAILDEDYKVTNADAASTSVLVANDGANVEIASGKKLETNTNVGLVATKGAGASLSTSVAENKGTLISTRTDKGIGIYTYTANGENSGTIIMKNQNSVGILGSGGSNLKNTGKIELEAISSAGVYAENSNMINSGTASEIVVKKKASVGIYARETSISSVPKNVKNEGKIEIKADGDGKSAGIYSKKEGGAKLTIENTGNIEVAQKASAGIYAKNESNQANTESVVTNSGLIKMSAENSIGIMGEKSKVENSGTGTKGIEIAGKKSAGILVTKESEVVNSGRILLANNSILASSDGLVGISVDGSSTGENDASGEIKIDAAYSTGMLSSGGDITNAGKIDLEKKESIGIYATNANVTNNGATTKGIFIKDEKSVGIYSKINSSSTADKIVTNSGTIDIGGTSKTGSAGIYSIVENGATKRLSTVSSGNITISQKESVGIYAKNKSSQANIESVVTNSGNGKIEVKNEGSAGILVEKSKVTNTAVGTNGIIVSAKKSAGIIGKLGSEIINSGIIKTETATPTAAADGVGGGSGGGSGGGSMKMEELFKKHKIVAVLRANSVEEAKKKALAVFLGGVHLIEITFTVPDADTVIKELSFLKEMGAIIGAGTVTSVEQARKAVESGAEFIVSPHLDEEISQFAKEKGVFYMPGVMTPTELVKAMKLGHTILKLFPGEVVGPQFVKAMKGPFPNVKFVPTGGVNLDNVCEWFKAGVLAVGVGSALVKGTPVEVAEKAKAFVEKIRGCTE

SEQ ID NO: 112 - protein, 1343 aa, Fusobacterium nucleatum
METDTLLLWVLLLWVPGSTGDESSEKHNSHQGWKASWSKTINVTELTNRNYVSLTRDTADSTIPTDQVINVTKENNRAMVVDEVRKNGIVVDFKGTINLQRSQNVGIDLQGTHQGSKSDPLIANIYNSGKIIGNAKYGSTANKEQIAFGFNNADGSNNTTMTNMVNKGEITLNAPSSAGIQLKPEDPHDWQPNSWNAAPLQIDNKTPNKIKGRVLMKADNQKDINLNGSGSFGMVTVFNEGVPKRLFAPSYVTNYENLRSERTYDGERVLPGGEIGRSALSDSKYTSGVYNTGNININGDSSIGVGLLQEIQEVKLAGNINIGTKAVTQETGISNLPNAGSKTYSINKVEEAVGVFAGVPTMPVKPGETDTLINGSGARNTATSLVGTETVEINGNISLGEHATQSIGALVGDTEVDLNKGQLTENGVNKGSNADRKLKRSGDITAKSNSIINVGGKKNYGFVVSNSAHSSKFGTTVDSLEYKVDKTHHGKGINEGKINVTGDESVGFAMIKGGDSKSSGIISVGNNAENSIGFYGKEDSFTNSGTIEVTSAKKKNKAVVLDGTNASNKINFTNTGNIYVNTSDNGNKNLDGDGNIGIYAQGNYKIEHNSGIVKAGKDAIAFYVKNSTGEVNINAPIELANSNKATTIGIYSDGDAKVKFGASSSLKIGEKAVGLYSADPTKFNNTFEIETGKTLNVELGKNSTFGLLNGNKNVTNSPLLSKYLNNNTTDKINITKFDEGASLFYATLKAKAILDEDYKVTNADAASTSVLVANDGANVEIASGKKLETNTNVGLVATKGAGASLSTSVAENKGTLISTRTDKGIGIYTYTANGENSGTIIMKNQNSVGILGSGGSNLKNTGKIELEAISSAGVYAENSNMINSGTASEIVVKKKASVGIYARETSISSVPKNVKNEGKIEIKADGDGKSAGIYSKKEGGAKLTIENTGNIEVAQKASAGIYAKNESNQANTESVVTNSGLIKMSAENSIGIMGEKSKVENSGTGTKGIEIAGKKSAGILVTKESEVVNSGRILLANNSILASSDGLVGISVDGSSTGENDASGEIKIDAAYSTGMLSSGGDITNAGKIDLEKKESIGIYATNANVTNNGATTKGIFIKDEKSVGIYSKINSSSTADKIVTNSGTIDIGGTSKTGSAGIYSIVENGATKRLSTVSSGNITISQKESVGIYAKNKSSQANIESVVTNSGNGKIEVKNEGSAGILVEKSKVTNTAVGTNGIIVSAKKSAGIIGKLGSEIINSGIIKTETATPTAAADGVGGGSAVGQDTQEVIVVPHSLPFKVVVISAILALVVLTIISLIILIMLWQKKPRGGGSAWSHPQFEK

SEQ ID NO: 113 - DNA, 10629 bp, Fusobacterium nucleatum
  source 1..10629: mol_type = other DNA
atggaaacagacacattgctgctatgggtcctgctgctctgggttccaggctccactggtgacgaagtgaacactgagcaaatgaaggtggtgccaacacgcgaagagatcgtctcgagcaaagagaacctgaagaactccgtcggaggactgcagaccaaaatcaacgacgccagatccgaaaacgaaaaggcgctgaaggggctgagactggagctaatacagctgatggaacagggaaaccaagtggtcaagtccccttggtcctcttggcagttcggcatgaactacttctacgaccactggggaagcgaatacaaggggcggggggacaagccccagaagtacctgttcaacggaatctacaccagaggtaactggaaagtgcggaacgccatggacgtagccgagaaccagagagttggtggaagacccctgacgcctggcaacgactctctgaacagctggaagaacgctaacaacagcagcaactccggcgtgaagatcgacagagacaacagcatctcttctagcacaaacgggaaccggagctggggcctggtggacctggaaaacctccgagaacctaccaacgaagtcgagatcctggcgagaatcagccccaaagaggtgaccaagcaggcaataagcctaaacatcacagaacctaccgtgcagaccctggaggcccctgacgtgaacccccaggtgaacgagcctctgcctgcccctgtgatagacctgcccgaagtagaaacggtgaccatcaaccctctgactatcaacgctcctgacgctcctaccgcgccttctgcgcctacaatcaacatcggcataacagcccccagcgcgcctagcgcccctaccatcaacgtggtgcccaccagcccctccacacctagcgcccctacgatcaacatcggcatccaacctcctagcatcacccctctgagcatcaccacgcctgacagcgttgacgccccaaacgtcgtatctccgcagatcaagccggtcgacttcacagtggaccctggcggggacagcaacgcttactctagcgagaagcacaacagccaccagggctggaaggccagctggtccaagaccatcaacgtgacagagctgaccaaccggaactacgtgtccctgacaagagacaccgctgactcgaccatcccaacagaccaggtgataaacgtgaccaaagagaacaacagagccatggtggttgacgaggtgagaaagaacgggatcgtagtggacttcaagggcaccatcaacctgcagagaagccagaacgtgggcatcgacctgcaaggtacacaccagggcagcaagagcgacccactgatcgccaacatctacaactccggaaagatcatcggcaacgccaaatacggaagcacggccaacaaggagcagatcgccttcggattcaacaacgccgacggctccaacaacacgaccatgaccaacatggtgaacaaaggagagataacactgaacgcgccttcctccgccggtatccaactgaagcctgaagacccccacgactggcagcctaactcttggaacgccgcgccactgcaaatcgacaacaagacgcccaacaaaatcaagggcagagtgctgatgaaggctgacaaccagaaagacataaacctgaacggctcaggcagcttcggcatggtcaccgtgttcaacgagggcgtacccaagagactgttcgcacccagctacgtaacaaactacgagaacttgcggtccgagcggacatacgacggcgagagagtgctgccaggcggcgagatcggccggagcgctctgtctgactctaaatacacatccggcgtgtacaacaccggcaacatcaacatcaacggtgacagctctatcggcgtgggcctgctgcaggagatacaggaggtgaagctcgccgggaacatcaacataggcaccaaggctgttacacaggagactggcatcagcaacctgcccaacgccgggtcgaaaacctacagcatcaacaaggtcgaagaggccgtgggagtgttcgccggcgtccctacgatgcctgtgaagcctggcgagacagacaccctgatcaacggctctggcgcaagaaacacagccacttccttggtgggcaccgagacagtggagatcaacggaaacatcagcctcggcgagcacgcgacccagtcaatcggcgccctggtgggcgacacggaagtggacctcaacaagggtcagctgaccgagaacggcgtaaacaaaggctctaacgccgacagaaagctgaagagaagcggggacatcacagcaaagagcaacagcatcatcaacgtgggcggaaaaaagaactacggattcgtggtgtctaactcagcccacagcagcaagttcggcacaaccgtggacagcctcgagtacaaggtggacaaaacccaccacggaaaaggcatcaacgaaggcaaaatcaacgtaacgggcgacgagtccgttggtttcgccatgatcaagggaggcgacagcaagagcagcggcatcatctctgtaggcaacaacgcggagaactccatcggcttctacggcaaggaggactccttcaccaacagcgggacaatagaggtgacgagcgcaaagaagaagaacaaggccgtagtgctggacgggacaaacgcttctaacaagatcaacttcaccaacaccggtaacatatacgtcaacactagcgacaacggaaacaagaacttggacggggacggcaacatcggtatctacgcccaaggtaactacaaaatcgagcacaacagcggcatcgtcaaggccggaaaggacgccatcgccttctacgtgaaaaactcaacaggagaagtgaacatcaacgcccctatcgagctggctaacagcaacaaggcaactactatcgggatctacagcgacggcgacgccaaggtaaaattcggggccagctcctcacttaagatcggggaaaaggctgtggggctctacagcgccgaccccacaaagttcaacaacacattcgaaatcgaaaccggcaagacactgaacgtggagctaggtaagaacagcacattcggccttctgaacggcaacaaaaacgttactaactccccactgctgtcaaagtacctgaacaacaacaccacggacaagatcaacatcaccaagttcgacgaaggcgcctccctgttctacgccacactgaaggccaaggccatcctggacgaggactacaaggtgacaaacgctgacgccgctagcacctctgtcctagtggccaacgacggggccaacgtggagatcgccagcgggaagaagctggaaaccaacacaaacgtgggcctggtggccaccaagggggctggcgcctctctgagcacctcagttgcggaaaacaaggggacccttatctctactcggacagacaagggcatcggcatctacacgtacacagccaacggtgagaacagcggaaccatcatcatgaaaaaccagaactccgttgggatactgggctccggaggatccaacctgaagaacacagggaagatcgagctggaagctatcagcagcgccggcgtgtacgccgaaaacagcaacatgatcaacagcgggacagcatcagagatcgtagtgaaaaagaaggcgtccgtgggcatctacgcccgcgaaacaagcatcagctctgtgccaaagaacgtgaaaaacgaggggaaaatcgagataaaagccgacggcgacgggaaatccgccggcatctactcgaagaaggagggcggcgccaaactgaccatcgaaaacacggggaacatcgaggtcgctcaaaaagcatcggccggcatctacgcgaaaaacgaatctaaccaggccaacacagagtctgtcgtgaccaacagcggcttaatcaagatgagcgccgagaacagcatcggcatcatgggcgaaaagagcaaggtagaaaactcaggtaccggaacaaaggggatcgagatcgccggaaaaaagagcgcaggcatcctggtgacaaaggaatctgaagtggtgaactccggcaggatccttctggccaacaactcaatcctggcgagctctgacggcctcgttggcatcagcgttgacggcagcagcacgggcgagaacgacgcctcaggagagatcaagatcgacgccgcctactctacaggaatgctctcttctggaggcgacatcaccaacgcaggaaaaatcgacctggaaaaaaaggaatctataggcatctacgccacaaacgccaacgtgacaaacaacggggctaccacgaaaggcatcttcatcaaggacgaaaagagcgttggcatctacagcaagatcaacagctctagcacggccgacaagatcgtcacaaactctggtaccatcgacataggcggaacaagcaagaccgggtccgcgggcatctactctatcgtggagaacggagctactaagagactgagcacggtatcctcggggaacatcaccatctctcagaaggagtcagtgggtatctacgccaagaacaaatcaagccaggccaacatcgagtctgttgttacaaactcagggaacggcaagatcgaggtcaagaacgagggctctgccggcatcctggtggaaaagagcaaggttaccaacacagctgtaggcaccaacggcataatcgtgagcgccaagaagtctgccggaataatcgggaagctgggcagcgaaatcatcaactcaggcataatcaagactgaaacagccacaccaacggccgccgccgacggtgtcgtcggcatcagcctgaacgcgtctaaggccaccaacgacagcaacggtacaatcacgctcgacacaaactacagcacaggcatgttcggtgagaacagctctacagcgataaacgaaggaaacatcacaggtaccaacaaggaaaacatagtcggcatggcgggtaaggccacaactgtcacaaacaagaagaccatcacgttgtccgccaaaaaatctactggcatcttcggcgaggacaacagcacgctcttgaacgacaccaacggcaacatcaccgtgaaggaagagtcctccgtcggcatctactcaaagggcaacaacaagatcgctgaaaacaagggcatcatcctcgccgaaaaaaagaagtctgccggaatgttgggttcagagggcaagctggagaacagcaacagcatcaccacccaggacgaggaaagcgccggaatgtacgtcgagaacagcagcgcaacaaacaaaaaaacaatcacagctaacggcaaaaagtcagcaggcgtgtacgtgaagctggacaaggctgccggaggcaccatcgcgggtacgaacgagggaaccaacgccaccatcacgatgacgaacgagggcagcgctgccatgctgggagaagtgaagtccctcgtgaccaacaactcggccactctgacactgaccaaccaaaacagcatcgtagtgaacaccaaggaaaccgtgggcatgatgatcactaacgacaccacaggcatccctaactccaacgtcaaggccctgaacacaggcaccatcgacctgaactccggcgctaccaacaaggacaacataggaatcctggccaacaagcgggccaccggaatcaacgagaagaacatcaacgtgaactccaaatcttctgtgggaatgctggctaaagagggttccaacatcgagaacaacaccaccttcagcaccatcaacctgaaggcagaatccggcatcggaatgctggccgacggcaaagacgcctctggcaacatatccacagccctgaacaacgctcggatagttgccacttccatcggcaagagatctctgggcatgctggcgcagaacaacggaaaagtcggcaacaacaaaaacatagacatcctggccgaaaacggagtgggcatcttcgtgagcgaaaccggcgtgggagagaacaccagcactggtactatcagcctggaaaacaaggagagcgtgggtatcttcgccaagaacaacggcaccaacgacaccgctaagaacagcggcactataaacctgggaaaggctgacggaagcacctctcacgagagcctgatcggcatgttcgcccaggccgagtccggtaagacagccagcgtgaagaacaccaaagacatcaacataaacaccaaaaagagcgttggcatgtacgccaaaaacgacgcctctaacatcaccgacgtggacctggaaaacaccggtgacataaacataaactcccaagagagcgcagggatctacgcccccaagtctaacatctcaaaggtgggaaccatcaccctgaaaaactccacagtgtctaacggcagcagcgctgtgtacgtgagcaacggaggaaaggtggccgacacagcatccgcgaagatcaacctcgggaaagtgaaccagaacagagtggcttactacgtgaacggtaaggactcagcgctcgccggcgccaacatcggcaagatcacagggtacggcgtgggagtatacctgcagggcgcgtctggagacaaggccaccctggactcgaacaccagcaaactggactacaccgcccagggcacaggcaacggcatcatcggcctactgctgaagggtgaaacagacatccagagctacatcaaaggcatcaaggttggtaacacggttcctagaagcaaccccagcgacaaagacaaatacgcaataggcatatacgccgacgcccaggggaccgccggcactccctacaacatcaccacccctatcacggccggaaagtccggtgtgggcatcttcgctgacaaggacagcaacatcaactacacaggcaacatggaaatcggtgacggcaccacagccggcactggcatcttcatcacaaagaagatcggggcaacaggcgggagagtgaccctgggcagcaacactatcaagctgaagggaacgaagggtgtagtggctatcgcctctgagggtacggaattcaacggtggcaccgccacaatcgagctggagggcaaggacgtgcagggtgtgggcgtgtacggcaagaagggctccgacgtagacgtgtcccactggaacttcaacaaccacggaaactcggctgaagaagtgagaagcgaagagggcaaagtgcacatcaacggcaacaaaaacctgaaaccccggatggtgcttacacacgtgatcaacggcgaaacatcaatcgtgacggggaaaaccgtgaccagcgtaaacgacggcaccatcaccgcaaaggaaaacatcggcctgatggcggagggtatcaaaaaccacggcatgaccatctggcaggagggaaacttcgaggccgtgaaccacgggactatcgacttcagcgcagctgaaaagagcaccgctatgttcatcaactcggctcggggcaagaacgacggaacgatcaaagtgggaaagaactcaatcgggatctacggtttctacaacaaggacacccggaagtacgagggtgctcctgcctcccctgaccctaacaagttagagatcgaaaccaccagcaactctaaaatctccctgggcgacgcctctacgggaatgtacctcatcaacgccgagaaaatcgagaacaagggcggtcaaatcacctctgagtccggggctactaagaacgtgggcatctacgccgttaacggccaagacagcataaacgtgaacaacaagaacctaacaatgacgacggccgcaaacatcgccctcggcaacggatccgttgggctgtactccaagggccagtcctacacagtccggaactccgtgacaaacactggtaacatcacggttggcgacaagatgaccggctctccttcagtcgccatgtacgctgaaaacactaacctgacaaccgacagcaagatcacggttggtaaagacggcatcgccttctacggcaagaacagcgacatcacagccaagggatctgccaacttcagcaacaagggggtcctggcctacctggaaaactcaaagttcatctcccacctgggtaacctgggggccacccagaacaccatgctgtacctgaaaaactcaatagcgcagctggacggtgccggcaccaaggtggacatggacgtggccgacggctacactggcgcctacatcgagggcaacagcacattgacaggcgtgaaaacgatcaagctgggccaggactcaaccggcctcttcctgaaagacgccaacttcgtgagcaacgccgagagcatcaccgggaccaaggacaaggccagaggaatcctagcgaccaacagcaacctcactaacaacagcaaaatcttcctgagcggggccgagtctatcggcatctactcaaacgctaacaacaccaagtcggtagtcaacaacggagaactcaccatcgcaggcaagaagactctgggagtgttcctgaagggttcccagagcctggaaaacaaggcgaacatcaacatcgccgactctgccaacagcctggaacccacaatcggcatctacacggccgaaggaagcagcaacatacggcacacctctggcaccatcgacgtgggacagaaatctatcggcatatactcgacaactaactcgaacgtggagatgaacggaggtaagatccacgtgaaggaccagggcatcggaatctacaagcagaacggaaaggccactatcaagggagagttggacatcgacacgcacatcgcaaccaccaaggacagcgagcccaccggcgtgtacgcggtgaacgggacagaaatcaacgaccaggcctccaagatcagcatcggagcaaagtcatacggcttcatcctgaacaacaccgacgtgaacaacactaacatctacaacaacaccgacgctgggaccgtgaccatgggcaacgacagcgtgttcctgtactccaacggtaaggccatcatcaacaacaaaagggacatctctgcgaacaactcgaaccacctgatcgctttctacatcaaaaacggcggcgacttcacaaacaacggcactatcgacttcagcaccggtaaaggcaacatcggcatctacgcccccggcggtaaggctacaaacaagggccggatcctggtgggcgccactgacgacatcgaccctatgacaggaaaggtgtacacagacgtcagcaaaaccgtgtacggaatcggcatggccgccgacaacggcggccacatcgtgaacgaaggcgaaatcaggatctacaacaacaaaagcatcgggatgtacgggaagggggtgggcacaacagtggagaacaaagggacgatcagcctggacggcagcagagccaccgccacgaacaagatccagagcatgacaggagtttacgtggacgacggcgctacattcaaaaactacggaacaatcaccacaaccgactcttacgccggacgagacggcaaggtcaacgagaacgtgaccggtctggctggcgtggccgtgatgaacgggtctaccctggaaaaccacggcaaaatctacatagacgctgacaacagctacggcgtgctcatcagaggcaaacgggacaccaaggggaacgtggaaagatacgcagtgatcaaaaactacggggagatcaaagttcggggcaaaggcacttggggcatctcttggaaggacgtgtcccaggctgacatcgacgagctgcaaaagcagatcaactctaagatcagctctgaccctgagagacaggccctccgggaggcagagggcacggacaagaactaccagggcgtgaccatcacagtgaaggacggaaagcctaccttcctgagaaacggcgtgcctatcagcgactctgaggtagaacagatcggcaaacttatcggcaaagagtctaacctgggaatgagcgacatcgggttctacgtggacaccctgggacgaacaaagcccatcgacatcgacggcgcaaaccctccaatcaactctcagctgataatagggacagagtacagcgagaaaaccaacaaaaagcaatggttcgtgaagggagacgtgataaagcccttcctggaccagatccagggtagaaacttcaaactgacatccatcgccggcagcctgacctggatcgctacccctgtgctggacaactacggccagataaccggggtggccatggctaagctgccctacacatctttcgtgaagaagacagacaacgcctggaacttcaccgacggccttgaacagagatacgacatgaacgccctggacagcgtagagaaaagaatcttcaacaagctgaacggaatagggaaaaacgaagaggccctgctgactcaggcttacgacgagatgatgggtcaccagtacgccaacgttcagcagagaggcggaggctctggaggagggtccggagggggctcaaaaaagcagggcgacgccgacgtgtgcggcgaggtggcctacatccagagcgtggtgtctgactgccacgtgcctacagctgagctgcggaccctgctggaaatcagaaagctgttcctggagatccaaaagctcaaggtcgagctgcagggactgagcaaggaatgatga

SEQ ID NO: 114 - DNA, 1257 bp, Fusobacterium nucleatum
  source 1..1257: mol_type = other DNA
atggaaacagacacattgctgctatgggtcctgctgctctgggttccaggctccactggtgacgaagtgaacactgagcaaatgaaggtggtgccaacacgcgaagagatcgtctcgagcaaagagaacctgaagaactccgtcggaggactgcagaccaaaatcaacgacgccagatccgaaaacgaaaaggcgctgaaggggctgagactggagctaatacagctgatggaacagggaaaccaagtggtcaagtccccttggtcctcttggcagttcggcatgaactacttctacgaccactggggaagcgaatacaaggggcggggggacaagccccagaagtacctgttcaacggaatctacaccagaggtaactggaaagtgcggaacgccatggacgtagccgagaaccagagagttggtggaagacccctgacgcctggcaacgactctctgaacagctggaagaacgctaacaacagcagcaactccggcgtgaagatcgacagagacaacagcatctcttctagcacaaacgggaaccggagctggggcctggtggacctggaaaacctccgagaacctaccaacgaagtcgagatcctggcgagaatcagccccaaagaggtgaccaagcaggcaataagcctaaacatcacagaacctaccgtgcagaccctggaggcccctgacgtgaacccccaggtgaacgagcctctgcctgcccctgtgatagacctgcccgaagtagaaacggtgaccatcaaccctctgactatcaacgctcctgacgctcctaccgcgccttctgcgcctacaatcaacatcggcataacagcccccagcgcgcctagcgcccctaccatcaacgtggtgcccaccagcccctccacacctagcgcccctacgatcaacatcggcatccaacctcctagcatcacccctctgagcatcaccacgcctgacagcgttgacgccccaaacgtcgtatctccgcagatcaagccggtcgacttcacagtggaccctggcggggacagcaacgctggcggaggctctggaggagggtccggagggggctcaaaaaagcagggcgacgccgacgtgtgcggcgaggtggcctacatccagagcgtggtgtctgactgccacgtgcctacagctgagctgcggaccctgctggaaatcagaaagctgttcctggagatccaaaagctcaaggtcgagctgcagggactgagcaaggaatgatga

SEQ ID NO: 115 - DNA, 3384 bp, Fusobacterium nucleatum
  source 1..3384: mol_type = other DNA
atggaaacagacacattgctgctatgggtcctgctgctctgggttccaggctccactggtgacgaagtgaacactgagcaaatgaaggtggtgccaacacgcgaagagatcgtctcgagcaaagagaacctgaagaactccgtcggaggactgcagaccaaaatcaacgacgccagatccgaaaacgaaaaggcgctgaaggggctgagactggagctaatacagctgatggaacagggaaaccaagtggtcaagtccccttggtcctcttggcagttcggcatgaactacttctacgaccactggggaagcgaatacaaggggcggggggacaagccccagaagtacctgttcaacggaatctacaccagaggtaactggaaagtgcggaacgccatggacgtagccgagaaccagagagttggtggaagacccctgacgcctggcaacgactctctgaacagctggaagaacgctaacaacagcagcaactccggcgtgaagatcgacagagacaacagcatctcttctagcacaaacgggaaccggagctggggcctggtggacctggaaaacctccgagaacctaccaacgaagtcgagatcctggcgagaatcagccccaaagaggtgaccaagcaggcaataagcctaaacatcacagaacctaccgtgcagaccctggaggcccctgacgtgaacccccaggtgaacgagcctctgcctgcccctgtgatagacctgcccgaagtagaaacggtgaccatcaaccctctgactatcaacgctcctgacgctcctaccgcgccttctgcgcctacaatcaacatcggcataacagcccccagcgcgcctagcgcccctaccatcaacgtggtgcccaccagcccctccacacctagcgcccctacgatcaacatcggcatccaacctcctagcatcacccctctgagcatcaccacgcctgacagcgttgacgccccaaacgtcgtatctccgcagatcaagccggtcgacttcacagtggaccctggcggggacagcaacgcttactctagcgagaagcacaacagccaccagggctggaaggccagctggtccaagaccatcaacgtgacagagctgaccaaccggaactacgtgtccctgacaagagacaccgctgactcgaccatcccaacagaccaggtgataaacgtgaccaaagagaacaacagagccatggtggttgacgaggtgagaaagaacgggatcgtagtggacttcaagggcaccatcaacctgcagagaagccagaacgtgggcatcgacctgcaaggtacacaccagggcagcaagagcgacccactgatcgccaacatctacaactccggaaagatcatcggcaacgccaaatacggaagcacggccaacaaggagcagatcgccttcggattcaacaacgccgacggctccaacaacacgaccatgaccaacatggtgaacaaaggagagataacactgaacgcgccttcctccgccggtatccaactgaagcctgaagacccccacgactggcagcctaactcttggaacgccgcgccactgcaaatcgacaacaagacgcccaacaaaatcaagggcagagtgctgatgaaggctgacaaccagaaagacataaacctgaacggctcaggcagcttcggcatggtcaccgtgttcaacgagggcgtacccaagagactgttcgcacccagctacgtaacaaactacgagaacttgcggtccgagcggacatacgacggcgagagagtgctgccaggcggcgagatcggccggagcgctctgtctgactctaaatacacatccggcgtgtacaacaccggcaacatcaacatcaacggtgacagctctatcggcgtgggcctgctgcaggagatacaggaggtgaagctcgccgggaacatcaacataggcaccaaggctgttacacaggagactggcatcagcaacctgcccaacgccgggtcgaaaacctacagcatcaacaaggtcgaagaggccgtgggagtgttcgccggcgtccctacgatgcctgtgaagcctggcgagacagacaccctgatcaacggctctggcgcaagaaacacagccacttccttggtgggcaccgagacagtggagatcaacggaaacatcagcctcggcgagcacgcgacccagtcaatcggcgccctggtgggcgacacggaagtggacctcaacaagggtcagctgaccgagaacggcgtaaacaaaggctctaacgccgacagaaagctgaagagaagcggggacatcacagcaaagagcaacagcatcatcaacgtgggcggaaaaaagaactacggattcgtggtgtctaactcagcccacagcagcaagttcggcacaaccgtggacagcctcgagtacaaggtggacaaaacccaccacggaaaaggcatcaacgaaggcaaaatcaacgtaacgggcgacgagtccgttggtttcgccatgatcaagggaggcgacagcaagagcagcggcatcatctctgtaggcaacaacgcggagaactccatcggcttctacggcaaggaggactccttcaccaacagcgggacaatagaggtgacgagcgcaaagaagaagaacaaggccgtagtgctggacgggacaaacgcttctaacaagatcaacttcaccaacaccggtaacatatacgtcaacactagcgacaacggaaacaagaacttggacggggacggcaacatcggtatctacgcccaaggtaactacaaaatcgagcacaacagcggcatcgtcaaggccggaaaggacgccatcgccttctacgtgaaaaactcaacaggagaagtgaacatcaacgcccctatcgagctggctaacagcaacaaggcaactactatcgggatctacagcgacggcgacgccaaggtaaaattcggggccagctcctcacttaagatcggggaaaaggctgtggggctctacagcgccgaccccacaaagttcaacaacacattcgaaatcgaaaccggcaagacactgaacgtggagctaggtaagaacagcacattcggccttctgaacggcaacaaaaacgttactaactccccactgctgtcaaagtacctgaacaacaacaccacggacggcggaggctctggaggagggtccggagggggctcaaaaaagcagggcgacgccgacgtgtgcggcgaggtggcctacatccagagcgtggtgtctgactgccacgtgcctacagctgagctgcggaccctgctggaaatcagaaagctgttcctggagatccaaaagctcaaggtcgagctgcagggactgagcaaggaatgatga

SEQ ID NO: 116 - DNA, 2397 bp, Fusobacterium nucleatum
  source 1..2397: mol_type = other DNA
atggaaacagacacattgctgctatgggtcctgctgctctgggttccaggctccactggtgacgaatctagcgagaagcacaacagccaccagggctggaaggccagctggtccaagaccatcaacgtgacagagctgaccaaccggaactacgtgtccctgacaagagacaccgctgactcgaccatcccaacagaccaggtgataaacgtgaccaaagagaacaacagagccatggtggttgacgaggtgagaaagaacgggatcgtagtggacttcaagggcaccatcaacctgcagagaagccagaacgtgggcatcgacctgcaaggtacacaccagggcagcaagagcgacccactgatcgccaacatctacaactccggaaagatcatcggcaacgccaaatacggaagcacggccaacaaggagcagatcgccttcggattcaacaacgccgacggctccaacaacacgaccatgaccaacatggtgaacaaaggagagataacactgaacgcgccttcctccgccggtatccaactgaagcctgaagacccccacgactggcagcctaactcttggaacgccgcgccactgcaaatcgacaacaagacgcccaacaaaatcaagggcagagtgctgatgaaggctgacaaccagaaagacataaacctgaacggctcaggcagcttcggcatggtcaccgtgttcaacgagggcgtacccaagagactgttcgcacccagctacgtaacaaactacgagaacttgcggtccgagcggacatacgacggcgagagagtgctgccaggcggcgagatcggccggagcgctctgtctgactctaaatacacatccggcgtgtacaacaccggcaacatcaacatcaacggtgacagctctatcggcgtgggcctgctgcaggagatacaggaggtgaagctcgccgggaacatcaacataggcaccaaggctgttacacaggagactggcatcagcaacctgcccaacgccgggtcgaaaacctacagcatcaacaaggtcgaagaggccgtgggagtgttcgccggcgtccctacgatgcctgtgaagcctggcgagacagacaccctgatcaacggctctggcgcaagaaacacagccacttccttggtgggcaccgagacagtggagatcaacggaaacatcagcctcggcgagcacgcgacccagtcaatcggcgccctggtgggcgacacggaagtggacctcaacaagggtcagctgaccgagaacggcgtaaacaaaggctctaacgccgacagaaagctgaagagaagcggggacatcacagcaaagagcaacagcatcatcaacgtgggcggaaaaaagaactacggattcgtggtgtctaactcagcccacagcagcaagttcggcacaaccgtggacagcctcgagtacaaggtggacaaaacccaccacggaaaaggcatcaacgaaggcaaaatcaacgtaacgggcgacgagtccgttggtttcgccatgatcaagggaggcgacagcaagagcagcggcatcatctctgtaggcaacaacgcggagaactccatcggcttctacggcaaggaggactccttcaccaacagcgggacaatagaggtgacgagcgcaaagaagaagaacaaggccgtagtgctggacgggacaaacgcttctaacaagatcaacttcaccaacaccggtaacatatacgtcaacactagcgacaacggaaacaagaacttggacggggacggcaacatcggtatctacgcccaaggtaactacaaaatcgagcacaacagcggcatcgtcaaggccggaaaggacgccatcgccttctacgtgaaaaactcaacaggagaagtgaacatcaacgcccctatcgagctggctaacagcaacaaggcaactactatcgggatctacagcgacggcgacgccaaggtaaaattcggggccagctcctcacttaagatcggggaaaaggctgtggggctctacagcgccgaccccacaaagttcaacaacacattcgaaatcgaaaccggcaagacactgaacgtggagctaggtaagaacagcacattcggccttctgaacggcaacaaaaacgttactaactccccactgctgtcaaagtacctgaacaacaacaccacggacggcggaggctctggaggagggtccggagggggctcaaaaaagcagggcgacgccgacgtgtgcggcgaggtggcctacatccagagcgtggtgtctgactgccacgtgcctacagctgagctgcggaccctgctggaaatcagaaagctgttcctggagatccaaaagctcaaggtcgagctgcagggactgagcaaggaatgatga

SEQ ID NO: 117 - DNA, 5025 bp, Fusobacterium nucleatum
  source 1..5025: mol_type = other DNA
atggaaacagacacattgctgctatgggtcctgctgctctgggttccaggctccactggtgacgaagtgaacactgagcaaatgaaggtggtgccaacacgcgaagagatcgtctcgagcaaagagaacctgaagaactccgtcggaggactgcagaccaaaatcaacgacgccagatccgaaaacgaaaaggcgctgaaggggctgagactggagctaatacagctgatggaacagggaaaccaagtggtcaagtccccttggtcctcttggcagttcggcatgaactacttctacgaccactggggaagcgaatacaaggggcggggggacaagccccagaagtacctgttcaacggaatctacaccagaggtaactggaaagtgcggaacgccatggacgtagccgagaaccagagagttggtggaagacccctgacgcctggcaacgactctctgaacagctggaagaacgctaacaacagcagcaactccggcgtgaagatcgacagagacaacagcatctcttctagcacaaacgggaaccggagctggggcctggtggacctggaaaacctccgagaacctaccaacgaagtcgagatcctggcgagaatcagccccaaagaggtgaccaagcaggcaataagcctaaacatcacagaacctaccgtgcagaccctggaggcccctgacgtgaacccccaggtgaacgagcctctgcctgcccctgtgatagacctgcccgaagtagaaacggtgaccatcaaccctctgactatcaacgctcctgacgctcctaccgcgccttctgcgcctacaatcaacatcggcataacagcccccagcgcgcctagcgcccctaccatcaacgtggtgcccaccagcccctccacacctagcgcccctacgatcaacatcggcatccaacctcctagcatcacccctctgagcatcaccacgcctgacagcgttgacgccccaaacgtcgtatctccgcagatcaagccggtcgacttcacagtggaccctggcggggacagcaacgcttactctagcgagaagcacaacagccaccagggctggaaggccagctggtccaagaccatcaacgtgacagagctgaccaaccggaactacgtgtccctgacaagagacaccgctgactcgaccatcccaacagaccaggtgataaacgtgaccaaagagaacaacagagccatggtggttgacgaggtgagaaagaacgggatcgtagtggacttcaagggcaccatcaacctgcagagaagccagaacgtgggcatcgacctgcaaggtacacaccagggcagcaagagcgacccactgatcgccaacatctacaactccggaaagatcatcggcaacgccaaatacggaagcacggccaacaaggagcagatcgccttcggattcaacaacgccgacggctccaacaacacgaccatgaccaacatggtgaacaaaggagagataacactgaacgcgccttcctccgccggtatccaactgaagcctgaagacccccacgactggcagcctaactcttggaacgccgcgccactgcaaatcgacaacaagacgcccaacaaaatcaagggcagagtgctgatgaaggctgacaaccagaaagacataaacctgaacggctcaggcagcttcggcatggtcaccgtgttcaacgagggcgtacccaagagactgttcgcacccagctacgtaacaaactacgagaacttgcggtccgagcggacatacgacggcgagagagtgctgccaggcggcgagatcggccggagcgctctgtctgactctaaatacacatccggcgtgtacaacaccggcaacatcaacatcaacggtgacagctctatcggcgtgggcctgctgcaggagatacaggaggtgaagctcgccgggaacatcaacataggcaccaaggctgttacacaggagactggcatcagcaacctgcccaacgccgggtcgaaaacctacagcatcaacaaggtcgaagaggccgtgggagtgttcgccggcgtccctacgatgcctgtgaagcctggcgagacagacaccctgatcaacggctctggcgcaagaaacacagccacttccttggtgggcaccgagacagtggagatcaacggaaacatcagcctcggcgagcacgcgacccagtcaatcggcgccctggtgggcgacacggaagtggacctcaacaagggtcagctgaccgagaacggcgtaaacaaaggctctaacgccgacagaaagctgaagagaagcggggacatcacagcaaagagcaacagcatcatcaacgtgggcggaaaaaagaactacggattcgtggtgtctaactcagcccacagcagcaagttcggcacaaccgtggacagcctcgagtacaaggtggacaaaacccaccacggaaaaggcatcaacgaaggcaaaatcaacgtaacgggcgacgagtccgttggtttcgccatgatcaagggaggcgacagcaagagcagcggcatcatctctgtaggcaacaacgcggagaactccatcggcttctacggcaaggaggactccttcaccaacagcgggacaatagaggtgacgagcgcaaagaagaagaacaaggccgtagtgctggacgggacaaacgcttctaacaagatcaacttcaccaacaccggtaacatatacgtcaacactagcgacaacggaaacaagaacttggacggggacggcaacatcggtatctacgcccaaggtaactacaaaatcgagcacaacagcggcatcgtcaaggccggaaaggacgccatcgccttctacgtgaaaaactcaacaggagaagtgaacatcaacgcccctatcgagctggctaacagcaacaaggcaactactatcgggatctacagcgacggcgacgccaaggtaaaattcggggccagctcctcacttaagatcggggaaaaggctgtggggctctacagcgccgaccccacaaagttcaacaacacattcgaaatcgaaaccggcaagacactgaacgtggagctaggtaagaacagcacattcggccttctgaacggcaacaaaaacgttactaactccccactgctgtcaaagtacctgaacaacaacaccacggacaagatcaacatcaccaagttcgacgaaggcgcctccctgttctacgccacactgaaggccaaggccatcctggacgaggactacaaggtgacaaacgctgacgccgctagcacctctgtcctagtggccaacgacggggccaacgtggagatcgccagcgggaagaagctggaaaccaacacaaacgtgggcctggtggccaccaagggggctggcgcctctctgagcacctcagttgcggaaaacaaggggacccttatctctactcggacagacaagggcatcggcatctacacgtacacagccaacggtgagaacagcggaaccatcatcatgaaaaaccagaactccgttgggatactgggctccggaggatccaacctgaagaacacagggaagatcgagctggaagctatcagcagcgccggcgtgtacgccgaaaacagcaacatgatcaacagcgggacagcatcagagatcgtagtgaaaaagaaggcgtccgtgggcatctacgcccgcgaaacaagcatcagctctgtgccaaagaacgtgaaaaacgaggggaaaatcgagataaaagccgacggcgacgggaaatccgccggcatctactcgaagaaggagggcggcgccaaactgaccatcgaaaacacggggaacatcgaggtcgctcaaaaagcatcggccggcatctacgcgaaaaacgaatctaaccaggccaacacagagtctgtcgtgaccaacagcggcttaatcaagatgagcgccgagaacagcatcggcatcatgggcgaaaagagcaaggtagaaaactcaggtaccggaacaaaggggatcgagatcgccggaaaaaagagcgcaggcatcctggtgacaaaggaatctgaagtggtgaactccggcaggatccttctggccaacaactcaatcctggcgagctctgacggcctcgttggcatcagcgttgacggcagcagcacgggcgagaacgacgcctcaggagagatcaagatcgacgccgcctactctacaggaatgctctcttctggaggcgacatcaccaacgcaggaaaaatcgacctggaaaaaaaggaatctataggcatctacgccacaaacgccaacgtgacaaacaacggggctaccacgaaaggcatcttcatcaaggacgaaaagagcgttggcatctacagcaagatcaacagctctagcacggccgacaagatcgtcacaaactctggtaccatcgacataggcggaacaagcaagaccgggtccgcgggcatctactctatcgtggagaacggagctactaagagactgagcacggtatcctcggggaacatcaccatctctcagaaggagtcagtgggtatctacgccaagaacaaatcaagccaggccaacatcgagtctgttgttacaaactcagggaacggcaagatcgaggtcaagaacgagggctctgccggcatcctggtggaaaagagcaaggttaccaacacagctgtaggcaccaacggcataatcgtgagcgccaagaagtctgccggaataatcgggaagctgggcagcgaaatcatcaactcaggcataatcaagactgaaacagccacaccaacggccgccgccgacggtgtcggcggaggctctggaggagggtccggagggggctcaaaaaagcagggcgacgccgacgtgtgcggcgaggtggcctacatccagagcgtggtgtctgactgccacgtgcctacagctgagctgcggaccctgctggaaatcagaaagctgttcctggagatccaaaagctcaaggtcgagctgcagggactgagcaaggaatgatga

SEQ ID NO: 118 - DNA, 4038 bp, Fusobacterium nucleatum
  source 1..4038: mol_type = other DNA
atggaaacagacacattgctgctatgggtcctgctgctctgggttccaggctccactggtgacgaatctagcgagaagcacaacagccaccagggctggaaggccagctggtccaagaccatcaacgtgacagagctgaccaaccggaactacgtgtccctgacaagagacaccgctgactcgaccatcccaacagaccaggtgataaacgtgaccaaagagaacaacagagccatggtggttgacgaggtgagaaagaacgggatcgtagtggacttcaagggcaccatcaacctgcagagaagccagaacgtgggcatcgacctgcaaggtacacaccagggcagcaagagcgacccactgatcgccaacatctacaactccggaaagatcatcggcaacgccaaatacggaagcacggccaacaaggagcagatcgccttcggattcaacaacgccgacggctccaacaacacgaccatgaccaacatggtgaacaaaggagagataacactgaacgcgccttcctccgccggtatccaactgaagcctgaagacccccacgactggcagcctaactcttggaacgccgcgccactgcaaatcgacaacaagacgcccaacaaaatcaagggcagagtgctgatgaaggctgacaaccagaaagacataaacctgaacggctcaggcagcttcggcatggtcaccgtgttcaacgagggcgtacccaagagactgttcgcacccagctacgtaacaaactacgagaacttgcggtccgagcggacatacgacggcgagagagtgctgccaggcggcgagatcggccggagcgctctgtctgactctaaatacacatccggcgtgtacaacaccggcaacatcaacatcaacggtgacagctctatcggcgtgggcctgctgcaggagatacaggaggtgaagctcgccgggaacatcaacataggcaccaaggctgttacacaggagactggcatcagcaacctgcccaacgccgggtcgaaaacctacagcatcaacaaggtcgaagaggccgtgggagtgttcgccggcgtccctacgatgcctgtgaagcctggcgagacagacaccctgatcaacggctctggcgcaagaaacacagccacttccttggtgggcaccgagacagtggagatcaacggaaacatcagcctcggcgagcacgcgacccagtcaatcggcgccctggtgggcgacacggaagtggacctcaacaagggtcagctgaccgagaacggcgtaaacaaaggctctaacgccgacagaaagctgaagagaagcggggacatcacagcaaagagcaacagcatcatcaacgtgggcggaaaaaagaactacggattcgtggtgtctaactcagcccacagcagcaagttcggcacaaccgtggacagcctcgagtacaaggtggacaaaacccaccacggaaaaggcatcaacgaaggcaaaatcaacgtaacgggcgacgagtccgttggtttcgccatgatcaagggaggcgacagcaagagcagcggcatcatctctgtaggcaacaacgcggagaactccatcggcttctacggcaaggaggactccttcaccaacagcgggacaatagaggtgacgagcgcaaagaagaagaacaaggccgtagtgctggacgggacaaacgcttctaacaagatcaacttcaccaacaccggtaacatatacgtcaacactagcgacaacggaaacaagaacttggacggggacggcaacatcggtatctacgcccaaggtaactacaaaatcgagcacaacagcggcatcgtcaaggccggaaaggacgccatcgccttctacgtgaaaaactcaacaggagaagtgaacatcaacgcccctatcgagctggctaacagcaacaaggcaactactatcgggatctacagcgacggcgacgccaaggtaaaattcggggccagctcctcacttaagatcggggaaaaggctgtggggctctacagcgccgaccccacaaagttcaacaacacattcgaaatcgaaaccggcaagacactgaacgtggagctaggtaagaacagcacattcggccttctgaacggcaacaaaaacgttactaactccccactgctgtcaaagtacctgaacaacaacaccacggacaagatcaacatcaccaagttcgacgaaggcgcctccctgttctacgccacactgaaggccaaggccatcctggacgaggactacaaggtgacaaacgctgacgccgctagcacctctgtcctagtggccaacgacggggccaacgtggagatcgccagcgggaagaagctggaaaccaacacaaacgtgggcctggtggccaccaagggggctggcgcctctctgagcacctcagttgcggaaaacaaggggacccttatctctactcggacagacaagggcatcggcatctacacgtacacagccaacggtgagaacagcggaaccatcatcatgaaaaaccagaactccgttgggatactgggctccggaggatccaacctgaagaacacagggaagatcgagctggaagctatcagcagcgccggcgtgtacgccgaaaacagcaacatgatcaacagcgggacagcatcagagatcgtagtgaaaaagaaggcgtccgtgggcatctacgcccgcgaaacaagcatcagctctgtgccaaagaacgtgaaaaacgaggggaaaatcgagataaaagccgacggcgacgggaaatccgccggcatctactcgaagaaggagggcggcgccaaactgaccatcgaaaacacggggaacatcgaggtcgctcaaaaagcatcggccggcatctacgcgaaaaacgaatctaaccaggccaacacagagtctgtcgtgaccaacagcggcttaatcaagatgagcgccgagaacagcatcggcatcatgggcgaaaagagcaaggtagaaaactcaggtaccggaacaaaggggatcgagatcgccggaaaaaagagcgcaggcatcctggtgacaaaggaatctgaagtggtgaactccggcaggatccttctggccaacaactcaatcctggcgagctctgacggcctcgttggcatcagcgttgacggcagcagcacgggcgagaacgacgcctcaggagagatcaagatcgacgccgcctactctacaggaatgctctcttctggaggcgacatcaccaacgcaggaaaaatcgacctggaaaaaaaggaatctataggcatctacgccacaaacgccaacgtgacaaacaacggggctaccacgaaaggcatcttcatcaaggacgaaaagagcgttggcatctacagcaagatcaacagctctagcacggccgacaagatcgtcacaaactctggtaccatcgacataggcggaacaagcaagaccgggtccgcgggcatctactctatcgtggagaacggagctactaagagactgagcacggtatcctcggggaacatcaccatctctcagaaggagtcagtgggtatctacgccaagaacaaatcaagccaggccaacatcgagtctgttgttacaaactcagggaacggcaagatcgaggtcaagaacgagggctctgccggcatcctggtggaaaagagcaaggttaccaacacagctgtaggcaccaacggcataatcgtgagcgccaagaagtctgccggaataatcgggaagctgggcagcgaaatcatcaactcaggcataatcaagactgaaacagccacaccaacggccgccgccgacggtgtcggcggaggctctggaggagggtccggagggggctcaaaaaagcagggcgacgccgacgtgtgcggcgaggtggcctacatccagagcgtggtgtctgactgccacgtgcctacagctgagctgcggaccctgctggaaatcagaaagctgttcctggagatccaaaagctcaaggtcgagctgcagggactgagcaaggaatgatga

SEQ ID NO: 119 - DNA, 6966 bp, Fusobacterium nucleatum
  source 1..6966: mol_type = other DNA
atggaaacagacacattgctgctatgggtcctgctgctctgggttccaggctccactggtgacgaagtgaacactgagcaaatgaaggtggtgccaacacgcgaagagatcgtctcgagcaaagagaacctgaagaactccgtcggaggactgcagaccaaaatcaacgacgccagatccgaaaacgaaaaggcgctgaaggggctgagactggagctaatacagctgatggaacagggaaaccaagtggtcaagtccccttggtcctcttggcagttcggcatgaactacttctacgaccactggggaagcgaatacaaggggcggggggacaagccccagaagtacctgttcaacggaatctacaccagaggtaactggaaagtgcggaacgccatggacgtagccgagaaccagagagttggtggaagacccctgacgcctggcaacgactctctgaacagctggaagaacgctaacaacagcagcaactccggcgtgaagatcgacagagacaacagcatctcttctagcacaaacgggaaccggagctggggcctggtggacctggaaaacctccgagaacctaccaacgaagtcgagatcctggcgagaatcagccccaaagaggtgaccaagcaggcaataagcctaaacatcacagaacctaccgtgcagaccctggaggcccctgacgtgaacccccaggtgaacgagcctctgcctgcccctgtgatagacctgcccgaagtagaaacggtgaccatcaaccctctgactatcaacgctcctgacgctcctaccgcgccttctgcgcctacaatcaacatcggcataacagcccccagcgcgcctagcgcccctaccatcaacgtggtgcccaccagcccctccacacctagcgcccctacgatcaacatcggcatccaacctcctagcatcacccctctgagcatcaccacgcctgacagcgttgacgccccaaacgtcgtatctccgcagatcaagccggtcgacttcacagtggaccctggcggggacagcaacgcttactctagcgagaagcacaacagccaccagggctggaaggccagctggtccaagaccatcaacgtgacagagctgaccaaccggaactacgtgtccctgacaagagacaccgctgactcgaccatcccaacagaccaggtgataaacgtgaccaaagagaacaacagagccatggtggttgacgaggtgagaaagaacgggatcgtagtggacttcaagggcaccatcaacctgcagagaagccagaacgtgggcatcgacctgcaaggtacacaccagggcagcaagagcgacccactgatcgccaacatctacaactccggaaagatcatcggcaacgccaaatacggaagcacggccaacaaggagcagatcgccttcggattcaacaacgccgacggctccaacaacacgaccatgaccaacatggtgaacaaaggagagataacactgaacgcgccttcctccgccggtatccaactgaagcctgaagacccccacgactggcagcctaactcttggaacgccgcgccactgcaaatcgacaacaagacgcccaacaaaatcaagggcagagtgctgatgaaggctgacaaccagaaagacataaacctgaacggctcaggcagcttcggcatggtcaccgtgttcaacgagggcgtacccaagagactgttcgcacccagctacgtaacaaactacgagaacttgcggtccgagcggacatacgacggcgagagagtgctgccaggcggcgagatcggccggagcgctctgtctgactctaaatacacatccggcgtgtacaacaccggcaacatcaacatcaacggtgacagctctatcggcgtgggcctgctgcaggagatacaggaggtgaagctcgccgggaacatcaacataggcaccaaggctgttacacaggagactggcatcagcaacctgcccaacgccgggtcgaaaacctacagcatcaacaaggtcgaagaggccgtgggagtgttcgccggcgtccctacgatgcctgtgaagcctggcgagacagacaccctgatcaacggctctggcgcaagaaacacagccacttccttggtgggcaccgagacagtggagatcaacggaaacatcagcctcggcgagcacgcgacccagtcaatcggcgccctggtgggcgacacggaagtggacctcaacaagggtcagctgaccgagaacggcgtaaacaaaggctctaacgccgacagaaagctgaagagaagcggggacatcacagcaaagagcaacagcatcatcaacgtgggcggaaaaaagaactacggattcgtggtgtctaactcagcccacagcagcaagttcggcacaaccgtggacagcctcgagtacaaggtggacaaaacccaccacggaaaaggcatcaacgaaggcaaaatcaacgtaacgggcgacgagtccgttggtttcgccatgatcaagggaggcgacagcaagagcagcggcatcatctctgtaggcaacaacgcggagaactccatcggcttctacggcaaggaggactccttcaccaacagcgggacaatagaggtgacgagcgcaaagaagaagaacaaggccgtagtgctggacgggacaaacgcttctaacaagatcaacttcaccaacaccggtaacatatacgtcaacactagcgacaacggaaacaagaacttggacggggacggcaacatcggtatctacgcccaaggtaactacaaaatcgagcacaacagcggcatcgtcaaggccggaaaggacgccatcgccttctacgtgaaaaactcaacaggagaagtgaacatcaacgcccctatcgagctggctaacagcaacaaggcaactactatcgggatctacagcgacggcgacgccaaggtaaaattcggggccagctcctcacttaagatcggggaaaaggctgtggggctctacagcgccgaccccacaaagttcaacaacacattcgaaatcgaaaccggcaagacactgaacgtggagctaggtaagaacagcacattcggccttctgaacggcaacaaaaacgttactaactccccactgctgtcaaagtacctgaacaacaacaccacggacaagatcaacatcaccaagttcgacgaaggcgcctccctgttctacgccacactgaaggccaaggccatcctggacgaggactacaaggtgacaaacgctgacgccgctagcacctctgtcctagtggccaacgacggggccaacgtggagatcgccagcgggaagaagctggaaaccaacacaaacgtgggcctggtggccaccaagggggctggcgcctctctgagcacctcagttgcggaaaacaaggggacccttatctctactcggacagacaagggcatcggcatctacacgtacacagccaacggtgagaacagcggaaccatcatcatgaaaaaccagaactccgttgggatactgggctccggaggatccaacctgaagaacacagggaagatcgagctggaagctatcagcagcgccggcgtgtacgccgaaaacagcaacatgatcaacagcgggacagcatcagagatcgtagtgaaaaagaaggcgtccgtgggcatctacgcccgcgaaacaagcatcagctctgtgccaaagaacgtgaaaaacgaggggaaaatcgagataaaagccgacggcgacgggaaatccgccggcatctactcgaagaaggagggcggcgccaaactgaccatcgaaaacacggggaacatcgaggtcgctcaaaaagcatcggccggcatctacgcgaaaaacgaatctaaccaggccaacacagagtctgtcgtgaccaacagcggcttaatcaagatgagcgccgagaacagcatcggcatcatgggcgaaaagagcaaggtagaaaactcaggtaccggaacaaaggggatcgagatcgccggaaaaaagagcgcaggcatcctggtgacaaaggaatctgaagtggtgaactccggcaggatccttctggccaacaactcaatcctggcgagctctgacggcctcgttggcatcagcgttgacggcagcagcacgggcgagaacgacgcctcaggagagatcaagatcgacgccgcctactctacaggaatgctctcttctggaggcgacatcaccaacgcaggaaaaatcgacctggaaaaaaaggaatctataggcatctacgccacaaacgccaacgtgacaaacaacggggctaccacgaaaggcatcttcatcaaggacgaaaagagcgttggcatctacagcaagatcaacagctctagcacggccgacaagatcgtcacaaactctggtaccatcgacataggcggaacaagcaagaccgggtccgcgggcatctactctatcgtggagaacggagctactaagagactgagcacggtatcctcggggaacatcaccatctctcagaaggagtcagtgggtatctacgccaagaacaaatcaagccaggccaacatcgagtctgttgttacaaactcagggaacggcaagatcgaggtcaagaacgagggctctgccggcatcctggtggaaaagagcaaggttaccaacacagctgtaggcaccaacggcataatcgtgagcgccaagaagtctgccggaataatcgggaagctgggcagcgaaatcatcaactcaggcataatcaagactgaaacagccacaccaacggccgccgccgacggtgtcgtcggcatcagcctgaacgcgtctaaggccaccaacgacagcaacggtacaatcacgctcgacacaaactacagcacaggcatgttcggtgagaacagctctacagcgataaacgaaggaaacatcacaggtaccaacaaggaaaacatagtcggcatggcgggtaaggccacaactgtcacaaacaagaagaccatcacgttgtccgccaaaaaatctactggcatcttcggcgaggacaacagcacgctcttgaacgacaccaacggcaacatcaccgtgaaggaagagtcctccgtcggcatctactcaaagggcaacaacaagatcgctgaaaacaagggcatcatcctcgccgaaaaaaagaagtctgccggaatgttgggttcagagggcaagctggagaacagcaacagcatcaccacccaggacgaggaaagcgccggaatgtacgtcgagaacagcagcgcaacaaacaaaaaaacaatcacagctaacggcaaaaagtcagcaggcgtgtacgtgaagctggacaaggctgccggaggcaccatcgcgggtacgaacgagggaaccaacgccaccatcacgatgacgaacgagggcagcgctgccatgctgggagaagtgaagtccctcgtgaccaacaactcggccactctgacactgaccaaccaaaacagcatcgtagtgaacaccaaggaaaccgtgggcatgatgatcactaacgacaccacaggcatccctaactccaacgtcaaggccctgaacacaggcaccatcgacctgaactccggcgctaccaacaaggacaacataggaatcctggccaacaagcgggccaccggaatcaacgagaagaacatcaacgtgaactccaaatcttctgtgggaatgctggctaaagagggttccaacatcgagaacaacaccaccttcagcaccatcaacctgaaggcagaatccggcatcggaatgctggccgacggcaaagacgcctctggcaacatatccacagccctgaacaacgctcggatagttgccacttccatcggcaagagatctctgggcatgctggcgcagaacaacggaaaagtcggcaacaacaaaaacatagacatcctggccgaaaacggagtgggcatcttcgtgagcgaaaccggcgtgggagagaacaccagcactggtactatcagcctggaaaacaaggagagcgtgggtatcttcgccaagaacaacggcaccaacgacaccgctaagaacagcggcactataaacctgggaaaggctgacggaagcacctctcacgagagcctgatcggcatgttcgcccaggccgagtccggtaagacagccagcgtgaagaacaccaaagacatcaacataaacaccaaaaagagcgttggcatgtacgccaaaaacgacgcctctaacatcaccgacgtggacctggaaaacaccggtgacataaacataaactcccaagagagcgcagggatctacgcccccaagtctaacatctcaaaggtgggaaccatcaccctgaaaaactccacagtgtctaacggcagcagcgctgtgtacgtgagcaacggaggaaaggtggccgacacagcatccgcgaagatcaacctcgggaaagtgaaccagaacagagtggcttactacgtgaacggtaaggactcagcgctcgccggcgccaacatcggcaagatcacagggtacggcgtgggagtatacctgcagggcgcgtctggagacaaggccaccctggactcgaacaccagcaaactggactacaccgcccagggcacaggcaacggcatcatcggcctactgctgaagggtgaaacagacatccagagctacatcaaaggcatcaaggttggtaacacggttcctagaagcaaccccagcgacaaagacaaatacgcaataggcggcggaggctctggaggagggtccggagggggctcaaaaaagcagggcgacgccgacgtgtgcggcgaggtggcctacatccagagcgtggtgtctgactgccacgtgcctacagctgagctgcggaccctgctggaaatcagaaagctgttcctggagatccaaaagctcaaggtcgagctgcagggactgagcaaggaatgatga

SEQ ID NO: 120 - protein, 3541 aa, Fusobacterium nucleatum
METDTLLLWVLLLWVPGSTGDEVNTEQMKVVPTREEIVSSKENLKNSVGGLQTKINDARSENEKALKGLRLELIQLMEQGNQVVKSPWSSWQFGMNYFYDHWGSEYKGRGDKPQKYLFNGIYTRGNWKVRNAMDVAENQRVGGRPLTPGNDSLNSWKNANNSSNSGVKIDRDNSISSSTNGNRSWGLVDLENLREPTNEVEILARISPKEVTKQAISLNITEPTVQTLEAPDVNPQVNEPLPAPVIDLPEVETVTINPLTINAPDAPTAPSAPTINIGITAPSAPSAPTINVVPTSPSTPSAPTINIGIQPPSITPLSITTPDSVDAPNVVSPQIKPVDFTVDPGGDSNAYSSEKHNSHQGWKASWSKTINVTELTNRNYVSLTRDTADSTIPTDQVINVTKENNRAMVVDEVRKNGIVVDFKGTINLQRSQNVGIDLQGTHQGSKSDPLIANIYNSGKIIGNAKYGSTANKEQIAFGFNNADGSNNTTMTNMVNKGEITLNAPSSAGIQLKPEDPHDWQPNSWNAAPLQIDNKTPNKIKGRVLMKADNQKDINLNGSGSFGMVTVFNEGVPKRLFAPSYVTNYENLRSERTYDGERVLPGGEIGRSALSDSKYTSGVYNTGNININGDSSIGVGLLQEIQEVKLAGNINIGTKAVTQETGISNLPNAGSKTYSINKVEEAVGVFAGVPTMPVKPGETDTLINGSGARNTATSLVGTETVEINGNISLGEHATQSIGALVGDTEVDLNKGQLTENGVNKGSNADRKLKRSGDITAKSNSIINVGGKKNYGFVVSNSAHSSKFGTTVDSLEYKVDKTHHGKGINEGKINVTGDESVGFAMIKGGDSKSSGIISVGNNAENSIGFYGKEDSFTNSGTIEVTSAKKKNKAVVLDGTNASNKINFTNTGNIYVNTSDNGNKNLDGDGNIGIYAQGNYKIEHNSGIVKAGKDAIAFYVKNSTGEVNINAPIELANSNKATTIGIYSDGDAKVKFGASSSLKIGEKAVGLYSADPTKFNNTFEIETGKTLNVELGKNSTFGLLNGNKNVTNSPLLSKYLNNNTTDKINITKFDEGASLFYATLKAKAILDEDYKVTNADAASTSVLVANDGANVEIASGKKLETNTNVGLVATKGAGASLSTSVAENKGTLISTRTDKGIGIYTYTANGENSGTIIMKNQNSVGILGSGGSNLKNTGKIELEAISSAGVYAENSNMINSGTASEIVVKKKASVGIYARETSISSVPKNVKNEGKIEIKADGDGKSAGIYSKKEGGAKLTIENTGNIEVAQKASAGIYAKNESNQANTESVVTNSGLIKMSAENSIGIMGEKSKVENSGTGTKGIEIAGKKSAGILVTKESEVVNSGRILLANNSILASSDGLVGISVDGSSTGENDASGEIKIDAAYSTGMLSSGGDITNAGKIDLEKKESIGIYATNANVTNNGATTKGIFIKDEKSVGIYSKINSSSTADKIVTNSGTIDIGGTSKTGSAGIYSIVENGATKRLSTVSSGNITISQKESVGIYAKNKSSQANIESVVTNSGNGKIEVKNEGSAGILVEKSKVTNTAVGTNGIIVSAKKSAGIIGKLGSEIINSGIIKTETATPTAAADGVVGISLNASKATNDSNGTITLDTNYSTGMFGENSSTAINEGNITGTNKENIVGMAGKATTVTNKKTITLSAKKSTGIFGEDNSTLLNDTNGNITVKEESSVGIYSKGNNKIAENKGIILAEKKKSAGMLGSEGKLENSNSITTQDEESAGMYVENSSATNKKTITANGKKSAGVYVKLDKAAGGTIAGTNEGTNATITMTNEGSAAMLGEVKSLVTNNSATLTLTNQNSIVVNTKETVGMMITNDTTGIPNSNVKALNTGTIDLNSGATNKDNIGILANKRATGINEKNINVNSKSSVGMLAKEGSNIENNTTFSTINLKAESGIGMLADGKDASGNISTALNNARIVATSIGKRSLGMLAQNNGKVGNNKNIDILAENGVGIFVSETGVGENTSTGTISLENKESVGIFAKNNGTNDTAKNSGTINLGKADGSTSHESLIGMFAQAESGKTASVKNTKDININTKKSVGMYAKNDASNITDVDLENTGDININSQESAGIYAPKSNISKVGTITLKNSTVSNGSSAVYVSNGGKVADTASAKINLGKVNQNRVAYYVNGKDSALAGANIGKITGYGVGVYLQGASGDKATLDSNTSKLDYTAQGTGNGIIGLLLKGETDIQSYIKGIKVGNTVPRSNPSDKDKYAIGIYADAQGTAGTPYNITTPITAGKSGVGIFADKDSNINYTGNMEIGDGTTAGTGIFITKKIGATGGRVTLGSNTIKLKGTKGVVAIASEGTEFNGGTATIELEGKDVQGVGVYGKKGSDVDVSHWNFNNHGNSAEEVRSEEGKVHINGNKNLKPRMVLTHVINGETSIVTGKTVTSVNDGTITAKENIGLMAEGIKNHGMTIWQEGNFEAVNHGTIDFSAAEKSTAMFINSARGKNDGTIKVGKNSIGIYGFYNKDTRKYEGAPASPDPNKLEIETTSNSKISLGDASTGMYLINAEKIENKGGQITSESGATKNVGIYAVNGQDSINVNNKNLTMTTAANIALGNGSVGLYSKGQSYTVRNSVTNTGNITVGDKMTGSPSVAMYAENTNLTTDSKITVGKDGIAFYGKNSDITAKGSANFSNKGVLAYLENSKFISHLGNLGATQNTMLYLKNSIAQLDGAGTKVDMDVADGYTGAYIEGNSTLTGVKTIKLGQDSTGLFLKDANFVSNAESITGTKDKARGILATNSNLTNNSKIFLSGAESIGIYSNANNTKSVVNNGELTIAGKKTLGVFLKGSQSLENKANINIADSANSLEPTIGIYTAEGSSNIRHTSGTIDVGQKSIGIYSTTNSNVEMNGGKIHVKDQGIGIYKQNGKATIKGELDIDTHIATTKDSEPTGVYAVNGTEINDQASKISIGAKSYGFILNNTDVNNTNIYNNTDAGTVTMGNDSVFLYSNGKAIINNKRDISANNSNHLIAFYIKNGGDFTNNGTIDFSTGKGNIGIYAPGGKATNKGRILVGATDDIDPMTGKVYTDVSKTVYGIGMAADNGGHIVNEGEIRIYNNKSIGMYGKGVGTTVENKGTISLDGSRATATNKIQSMTGVYVDDGATFKNYGTITTTDSYAGRDGKVNENVTGLAGVAVMNGSTLENHGKIYIDADNSYGVLIRGKRDTKGNVERYAVIKNYGEIKVRGKGTWGISWKDVSQADIDELQKQINSKISSDPERQALREAEGTDKNYQGVTITVKDGKPTFLRNGVPISDSEVEQIGKLIGKESNLGMSDIGFYVDTLGRTKPIDIDGANPPINSQLIIGTEYSEKTNKKQWFVKGDVIKPFLDQIQGRNFKLTSIAGSLTWIATPVLDNYGQITGVAMAKLPYTSFVKKTDNAWNFTDGLEQRYDMNALDSVEKRIFNKLNGIGKNEEALLTQAYDEMMGHQYANVQQRGGGSGGGSGGGSKKQGDADVCGEVAYIQSVVSDCHVPTAELRTLLEIRKLFLEIQKLKVELQGLSKE

SEQ ID NO: 121 - protein, 417 aa, Fusobacterium nucleatum
METDTLLLWVLLLWVPGSTGDEVNTEQMKVVPTREEIVSSKENLKNSVGGLQTKINDARSENEKALKGLRLELIQLMEQGNQVVKSPWSSWQFGMNYFYDHWGSEYKGRGDKPQKYLFNGIYTRGNWKVRNAMDVAENQRVGGRPLTPGNDSLNSWKNANNSSNSGVKIDRDNSISSSTNGNRSWGLVDLENLREPTNEVEILARISPKEVTKQAISLNITEPTVQTLEAPDVNPQVNEPLPAPVIDLPEVETVTINPLTINAPDAPTAPSAPTINIGITAPSAPSAPTINVVPTSPSTPSAPTINIGIQPPSITPLSITTPDSVDAPNVVSPQIKPVDFTVDPGGDSNAGGGSGGGSGGGSKKQGDADVCGEVAYIQSVVSDCHVPTAELRTLLEIRKLFLEIQKLKVELQGLSKE

SEQ ID NO: 122 - protein, 1126 aa, Fusobacterium nucleatum
METDTLLLWVLLLWVPGSTGDEVNTEQMKVVPTREEIVSSKENLKNSVGGLQTKINDARSENEKALKGLRLELIQLMEQGNQVVKSPWSSWQFGMNYFYDHWGSEYKGRGDKPQKYLFNGIYTRGNWKVRNAMDVAENQRVGGRPLTPGNDSLNSWKNANNSSNSGVKIDRDNSISSSTNGNRSWGLVDLENLREPTNEVEILARISPKEVTKQAISLNITEPTVQTLEAPDVNPQVNEPLPAPVIDLPEVETVTINPLTINAPDAPTAPSAPTINIGITAPSAPSAPTINVVPTSPSTPSAPTINIGIQPPSITPLSITTPDSVDAPNVVSPQIKPVDFTVDPGGDSNAYSSEKHNSHQGWKASWSKTINVTELTNRNYVSLTRDTADSTIPTDQVINVTKENNRAMVVDEVRKNGIVVDFKGTINLQRSQNVGIDLQGTHQGSKSDPLIANIYNSGKIIGNAKYGSTANKEQIAFGFNNADGSNNTTMTNMVNKGEITLNAPSSAGIQLKPEDPHDWQPNSWNAAPLQIDNKTPNKIKGRVLMKADNQKDINLNGSGSFGMVTVFNEGVPKRLFAPSYVTNYENLRSERTYDGERVLPGGEIGRSALSDSKYTSGVYNTGNININGDSSIGVGLLQEIQEVKLAGNINIGTKAVTQETGISNLPNAGSKTYSINKVEEAVGVFAGVPTMPVKPGETDTLINGSGARNTATSLVGTETVEINGNISLGEHATQSIGALVGDTEVDLNKGQLTENGVNKGSNADRKLKRSGDITAKSNSIINVGGKKNYGFVVSNSAHSSKFGTTVDSLEYKVDKTHHGKGINEGKINVTGDESVGFAMIKGGDSKSSGIISVGNNAENSIGFYGKEDSFTNSGTIEVTSAKKKNKAVVLDGTNASNKINFTNTGNIYVNTSDNGNKNLDGDGNIGIYAQGNYKIEHNSGIVKAGKDAIAFYVKNSTGEVNINAPIELANSNKATTIGIYSDGDAKVKFGASSSLKIGEKAVGLYSADPTKFNNTFEIETGKTLNVELGKNSTFGLLNGNKNVTNSPLLSKYLNNNTTDGGGSGGGSGGGSKKQGDADVCGEVAYIQSVVSDCHVPTAELRTLLEIRKLFLEIQKLKVELQGLSKE

SEQ ID NO: 123 - protein, 797 aa, Fusobacterium nucleatum
METDTLLLWVLLLWVPGSTGDESSEKHNSHQGWKASWSKTINVTELTNRNYVSLTRDTADSTIPTDQVINVTKENNRAMVVDEVRKNGIVVDFKGTINLQRSQNVGIDLQGTHQGSKSDPLIANIYNSGKIIGNAKYGSTANKEQIAFGFNNADGSNNTTMTNMVNKGEITLNAPSSAGIQLKPEDPHDWQPNSWNAAPLQIDNKTPNKIKGRVLMKADNQKDINLNGSGSFGMVTVFNEGVPKRLFAPSYVTNYENLRSERTYDGERVLPGGEIGRSALSDSKYTSGVYNTGNININGDSSIGVGLLQEIQEVKLAGNINIGTKAVTQETGISNLPNAGSKTYSINKVEEAVGVFAGVPTMPVKPGETDTLINGSGARNTATSLVGTETVEINGNISLGEHATQSIGALVGDTEVDLNKGQLTENGVNKGSNADRKLKRSGDITAKSNSIINVGGKKNYGFVVSNSAHSSKFGTTVDSLEYKVDKTHHGKGINEGKINVTGDESVGFAMIKGGDSKSSGIISVGNNAENSIGFYGKEDSFTNSGTIEVTSAKKKNKAVVLDGTNASNKINFTNTGNIYVNTSDNGNKNLDGDGNIGIYAQGNYKIEHNSGIVKAGKDAIAFYVKNSTGEVNINAPIELANSNKATTIGIYSDGDAKVKFGASSSLKIGEKAVGLYSADPTKFNNTFEIETGKTLNVELGKNSTFGLLNGNKNVTNSPLLSKYLNNNTTDGGGSGGGSGGGSKKQGDADVCGEVAYIQSVVSDCHVPTAELRTLLEIRKLFLEIQKLKVELQGLSKE

SEQ ID NO: 124 - protein, 1673 aa, Fusobacterium nucleatum
METDTLLLWVLLLWVPGSTGDEVNTEQMKVVPTREEIVSSKENLKNSVGGLQTKINDARSENEKALKGLRLELIQLMEQGNQVVKSPWSSWQFGMNYFYDHWGSEYKGRGDKPQKYLFNGIYTRGNWKVRNAMDVAENQRVGGRPLTPGNDSLNSWKNANNSSNSGVKIDRDNSISSSTNGNRSWGLVDLENLREPTNEVEILARISPKEVTKQAISLNITEPTVQTLEAPDVNPQVNEPLPAPVIDLPEVETVTINPLTINAPDAPTAPSAPTINIGITAPSAPSAPTINVVPTSPSTPSAPTINIGIQPPSITPLSITTPDSVDAPNVVSPQIKPVDFTVDPGGDSNAYSSEKHNSHQGWKASWSKTINVTELTNRNYVSLTRDTADSTIPTDQVINVTKENNRAMVVDEVRKNGIVVDFKGTINLQRSQNVGIDLQGTHQGSKSDPLIANIYNSGKIIGNAKYGSTANKEQIAFGFNNADGSNNTTMTNMVNKGEITLNAPSSAGIQLKPEDPHDWQPNSWNAAPLQIDNKTPNKIKGRVLMKADNQKDINLNGSGSFGMVTVFNEGVPKRLFAPSYVTNYENLRSERTYDGERVLPGGEIGRSALSDSKYTSGVYNTGNININGDSSIGVGLLQEIQEVKLAGNINIGTKAVTQETGISNLPNAGSKTYSINKVEEAVGVFAGVPTMPVKPGETDTLINGSGARNTATSLVGTETVEINGNISLGEHATQSIGALVGDTEVDLNKGQLTENGVNKGSNADRKLKRSGDITAKSNSIINVGGKKNYGFVVSNSAHSSKFGTTVDSLEYKVDKTHHGKGINEGKINVTGDESVGFAMIKGGDSKSSGIISVGNNAENSIGFYGKEDSFTNSGTIEVTSAKKKNKAVVLDGTNASNKINFTNTGNIYVNTSDNGNKNLDGDGNIGIYAQGNYKIEHNSGIVKAGKDAIAFYVKNSTGEVNINAPIELANSNKATTIGIYSDGDAKVKFGASSSLKIGEKAVGLYSADPTKFNNTFEIETGKTLNVELGKNSTFGLLNGNKNVTNSPLLSKYLNNNTTDKINITKFDEGASLFYATLKAKAILDEDYKVTNADAASTSVLVANDGANVEIASGKKLETNTNVGLVATKGAGASLSTSVAENKGTLISTRTDKGIGIYTYTANGENSGTIIMKNQNSVGILGSGGSNLKNTGKIELEAISSAGVYAENSNMINSGTASEIVVKKKASVGIYARETSISSVPKNVKNEGKIEIKADGDGKSAGIYSKKEGGAKLTIENTGNIEVAQKASAGIYAKNESNQANTESVVTNSGLIKMSAENSIGIMGEKSKVENSGTGTKGIEIAGKKSAGILVTKESEVVNSGRILLANNSILASSDGLVGISVDGSSTGENDASGEIKIDAAYSTGMLSSGGDITNAGKIDLEKKESIGIYATNANVTNNGATTKGIFIKDEKSVGIYSKINSSSTADKIVTNSGTIDIGGTSKTGSAGIYSIVENGATKRLSTVSSGNITISQKESVGIYAKNKSSQANIESVVTNSGNGKIEVKNEGSAGILVEKSKVTNTAVGTNGIIVSAKKSAGIIGKLGSEIINSGIIKTETATPTAAADGVGGGSGGGSGGGSKKQGDADVCGEVAYIQSVVSDCHVPTAELRTLLEIRKLFLEIQKLKVELQGLSKE

SEQ ID NO: 125 - protein, 1344 aa, Fusobacterium nucleatum
METDTLLLWVLLLWVPGSTGDESSEKHNSHQGWKASWSKTINVTELTNRNYVSLTRDTADSTIPTDQVINVTKENNRAMVVDEVRKNGIVVDFKGTINLQRSQNVGIDLQGTHQGSKSDPLIANIYNSGKIIGNAKYGSTANKEQIAFGFNNADGSNNTTMTNMVNKGEITLNAPSSAGIQLKPEDPHDWQPNSWNAAPLQIDNKTPNKIKGRVLMKADNQKDINLNGSGSFGMVTVFNEGVPKRLFAPSYVTNYENLRSERTYDGERVLPGGEIGRSALSDSKYTSGVYNTGNININGDSSIGVGLLQEIQEVKLAGNINIGTKAVTQETGISNLPNAGSKTYSINKVEEAVGVFAGVPTMPVKPGETDTLINGSGARNTATSLVGTETVEINGNISLGEHATQSIGALVGDTEVDLNKGQLTENGVNKGSNADRKLKRSGDITAKSNSIINVGGKKNYGFVVSNSAHSSKFGTTVDSLEYKVDKTHHGKGINEGKINVTGDESVGFAMIKGGDSKSSGIISVGNNAENSIGFYGKEDSFTNSGTIEVTSAKKKNKAVVLDGTNASNKINFTNTGNIYVNTSDNGNKNLDGDGNIGIYAQGNYKIEHNSGIVKAGKDAIAFYVKNSTGEVNINAPIELANSNKATTIGIYSDGDAKVKFGASSSLKIGEKAVGLYSADPTKFNNTFEIETGKTLNVELGKNSTFGLLNGNKNVTNSPLLSKYLNNNTTDKINITKFDEGASLFYATLKAKAILDEDYKVTNADAASTSVLVANDGANVEIASGKKLETNTNVGLVATKGAGASLSTSVAENKGTLISTRTDKGIGIYTYTANGENSGTIIMKNQNSVGILGSGGSNLKNTGKIELEAISSAGVYAENSNMINSGTASEIVVKKKASVGIYARETSISSVPKNVKNEGKIEIKADGDGKSAGIYSKKEGGAKLTIENTGNIEVAQKASAGIYAKNESNQANTESVVTNSGLIKMSAENSIGIMGEKSKVENSGTGTKGIEIAGKKSAGILVTKESEVVNSGRILLANNSILASSDGLVGISVDGSSTGENDASGEIKIDAAYSTGMLSSGGDITNAGKIDLEKKESIGIYATNANVTNNGATTKGIFIKDEKSVGIYSKINSSSTADKIVTNSGTIDIGGTSKTGSAGIYSIVENGATKRLSTVSSGNITISQKESVGIYAKNKSSQANIESVVTNSGNGKIEVKNEGSAGILVEKSKVTNTAVGTNGIIVSAKKSAGIIGKLGSEIINSGIIKTETATPTAAADGVGGGSGGGSGGGSKKQGDADVCGEVAYIQSVVSDCHVPTAELRTLLEIRKLFLEIQKLKVELQGLSKE

SEQ ID NO: 126 - protein, 2320 aa, Fusobacterium nucleatum
METDTLLLWVLLLWVPGSTGDEVNTEQMKVVPTREEIVSSKENLKNSVGGLQTKINDARSENEKALKGLRLELIQLMEQGNQVVKSPWSSWQFGMNYFYDHWGSEYKGRGDKPQKYLFNGIYTRGNWKVRNAMDVAENQRVGGRPLTPGNDSLNSWKNANNSSNSGVKIDRDNSISSSTNGNRSWGLVDLENLREPTNEVEILARISPKEVTKQAISLNITEPTVQTLEAPDVNPQVNEPLPAPVIDLPEVETVTINPLTINAPDAPTAPSAPTINIGITAPSAPSAPTINVVPTSPSTPSAPTINIGIQPPSITPLSITTPDSVDAPNVVSPQIKPVDFTVDPGGDSNAYSSEKHNSHQGWKASWSKTINVTELTNRNYVSLTRDTADSTIPTDQVINVTKENNRAMVVDEVRKNGIVVDFKGTINLQRSQNVGIDLQGTHQGSKSDPLIANIYNSGKIIGNAKYGSTANKEQIAFGFNNADGSNNTTMTNMVNKGEITLNAPSSAGIQLKPEDPHDWQPNSWNAAPLQIDNKTPNKIKGRVLMKADNQKDINLNGSGSFGMVTVFNEGVPKRLFAPSYVTNYENLRSERTYDGERVLPGGEIGRSALSDSKYTSGVYNTGNININGDSSIGVGLLQEIQEVKLAGNINIGTKAVTQETGISNLPNAGSKTYSINKVEEAVGVFAGVPTMPVKPGETDTLINGSGARNTATSLVGTETVEINGNISLGEHATQSIGALVGDTEVDLNKGQLTENGVNKGSNADRKLKRSGDITAKSNSIINVGGKKNYGFVVSNSAHSSKFGTTVDSLEYKVDKTHHGKGINEGKINVTGDESVGFAMIKGGDSKSSGIISVGNNAENSIGFYGKEDSFTNSGTIEVTSAKKKNKAVVLDGTNASNKINFTNTGNIYVNTSDNGNKNLDGDGNIGIYAQGNYKIEHNSGIVKAGKDAIAFYVKNSTGEVNINAPIELANSNKATTIGIYSDGDAKVKFGASSSLKIGEKAVGLYSADPTKFNNTFEIETGKTLNVELGKNSTFGLLNGNKNVTNSPLLSKYLNNNTTDKINITKFDEGASLFYATLKAKAILDEDYKVTNADAASTSVLVANDGANVEIASGKKLETNTNVGLVATKGAGASLSTSVAENKGTLISTRTDKGIGIYTYTANGENSGTIIMKNQNSVGILGSGGSNLKNTGKIELEAISSAGVYAENSNMINSGTASEIVVKKKASVGIYARETSISSVPKNVKNEGKIEIKADGDGKSAGIYSKKEGGAKLTIENTGNIEVAQKASAGIYAKNESNQANTESVVTNSGLIKMSAENSIGIMGEKSKVENSGTGTKGIEIAGKKSAGILVTKESEVVNSGRILLANNSILASSDGLVGISVDGSSTGENDASGEIKIDAAYSTGMLSSGGDITNAGKIDLEKKESIGIYATNANVTNNGATTKGIFIKDEKSVGIYSKINSSSTADKIVTNSGTIDIGGTSKTGSAGIYSIVENGATKRLSTVSSGNITISQKESVGIYAKNKSSQANIESVVTNSGNGKIEVKNEGSAGILVEKSKVTNTAVGTNGIIVSAKKSAGIIGKLGSEIINSGIIKTETATPTAAADGVVGISLNASKATNDSNGTITLDTNYSTGMFGENSSTAINEGNITGTNKENIVGMAGKATTVTNKKTITLSAKKSTGIFGEDNSTLLNDTNGNITVKEESSVGIYSKGNNKIAENKGIILAEKKKSAGMLGSEGKLENSNSITTQDEESAGMYVENSSATNKKTITANGKKSAGVYVKLDKAAGGTIAGTNEGTNATITMTNEGSAAMLGEVKSLVTNNSATLTLTNQNSIVVNTKETVGMMITNDTTGIPNSNVKALNTGTIDLNSGATNKDNIGILANKRATGINEKNINVNSKSSVGMLAKEGSNIENNTTFSTINLKAESGIGMLADGKDASGNISTALNNARIVATSIGKRSLGMLAQNNGKVGNNKNIDILAENGVGIFVSETGVGENTSTGTISLENKESVGIFAKNNGTNDTAKNSGTINLGKADGSTSHESLIGMFAQAESGKTASVKNTKDININTKKSVGMYAKNDASNITDVDLENTGDININSQESAGIYAPKSNISKVGTITLKNSTVSNGSSAVYVSNGGKVADTASAKINLGKVNQNRVAYYVNGKDSALAGANIGKITGYGVGVYLQGASGDKATLDSNTSKLDYTAQGTGNGIIGLLLKGETDIQSYIKGIKVGNTVPRSNPSDKDKYAIGGGGSGGGSGGGSKKQGDADVCGEVAYIQSVVSDCHVPTAELRTLLEIRKLFLEIQKLKVELQGLSKE

SEQ ID NO: 127 - protein, 12 aa, Fusobacterium nucleatum
SLNSWKNANNSS

SEQ ID NO: 128 - protein, 12 aa, Fusobacterium nucleatum
LNSWKNANNSSN

SEQ ID NO: 129 - protein, 12 aa, Fusobacterium nucleatum
ETDTLINGSGAR

SEQ ID NO: 130 - protein, 12 aa, Fusobacterium nucleatum
TDTLINGSGARN

SEQ ID NO: 131 - protein, 12 aa, Fusobacterium nucleatum
DTLINGSGARNT

SEQ ID NO: 132 - protein, 12 aa, Fusobacterium nucleatum
TLINGSGARNTA

SEQ ID NO: 133 - protein, 12 aa, Fusobacterium nucleatum
LINGSGARNTAT

SEQ ID NO: 134 - protein, 12 aa, Fusobacterium nucleatum
KSSQANIESVVT

SEQ ID NO: 135 - protein, 12 aa, Fusobacterium nucleatum
EESAGMYVENSS

SEQ ID NO: 136 - protein, 12 aa, Fusobacterium nucleatum
ESAGMYVENSSA

SEQ ID NO: 137 - protein, 12 aa, Fusobacterium nucleatum
SAGMYVENSSAT

SEQ ID NO: 138 - protein, 12 aa, Fusobacterium nucleatum
AGMYVENSSATN

SEQ ID NO: 139 - protein, 12 aa, Fusobacterium nucleatum
GMYVENSSATNK

SEQ ID NO: 140 - protein, 12 aa, Fusobacterium nucleatum
MYVENSSATNKK

SEQ ID NO: 141 - protein, 12 aa, Fusobacterium nucleatum
QKQINSKISSDP

SEQ ID NO: 142 - protein, 12 aa, Fusobacterium nucleatum
DTLINSSGARNT

SEQ ID NO: 143 - protein, 12 aa, Fusobacterium nucleatum
TLINSSGARNTA

SEQ ID NO: 144 - protein, 12 aa, Fusobacterium nucleatum
LINSSGARNTAT

SEQ ID NO: 145 - protein, 12 aa, Fusobacterium nucleatum
NESTQANTQSEV

SEQ ID NO: 146 - protein, 12 aa, Fusobacterium nucleatum
ESTQANTQSEVT

SEQ ID NO: 147 - protein, 12 aa, Fusobacterium nucleatum
STQANTQSEVTN

SEQ ID NO: 148 - protein, 12 aa, Fusobacterium nucleatum
TQANTQSEVTNS

SEQ ID NO: 149 - protein, 12 aa, Fusobacterium nucleatum
EESVGMYSSSSL

SEQ ID NO: 150 - protein, 12 aa, Fusobacterium nucleatum
ESVGMYSSSSLK

SEQ ID NO: 151 - protein, 12 aa, Fusobacterium nucleatum
SVGMYSSSSLKA

SEQ ID NO: 152 - protein, 12 aa, Fusobacterium nucleatum
TLDKNTSKLDYT

SEQ ID NO: 153 - protein, 12 aa, Fusobacterium nucleatum
LDKNTSKLDYTL

SEQ ID NO: 154 - protein, 12 aa, Fusobacterium nucleatum
DKNTSKLDYTLQ

SEQ ID NO: 155 - protein, 12 aa, Fusobacterium nucleatum
KNTSKLDYTLQG

SEQ ID NO: 156 - protein, 12 aa, Fusobacterium nucleatum
NTSKLDYTLQGT

SEQ ID NO: 157 - protein, 12 aa, Fusobacterium nucleatum
TSKLDYTLQGTG

SEQ ID NO: 158 - protein, 12 aa, Fusobacterium nucleatum
ENKGGQITSESG

SEQ ID NO: 159 - protein, 12 aa, Fusobacterium nucleatum
KEEESVGMYSSS

SEQ ID NO: 160 - protein, 12 aa, Fusobacterium nucleatum
EEESVGMYSSSS

SEQ ID NO: 161 - protein, 12 aa, Fusobacterium nucleatum
KLELETTSNSKI

SEQ ID NO: 162 - protein, 12 aa, Fusobacterium nucleatum
LELETTSNSKIS

SEQ ID NO: 163 - protein, 12 aa, Fusobacterium nucleatum
ELETTSNSKISL

SEQ ID NO: 164 - protein, 12 aa, Fusobacterium nucleatum
LETTSNSKISLG

SEQ ID NO: 165 - protein, 12 aa, Fusobacterium nucleatum
IENKGGQITSES

SEQ ID NO: 166 - protein, 12 aa, Fusobacterium nucleatum
ENKGGQITSESG

SEQ ID NO: 167 - protein, 12 aa, Fusobacterium nucleatum
NKGGQITSESGA

SEQ ID NO: 168 - protein, 12 aa, Fusobacterium nucleatum
KGGQITSESGAT

SEQ ID NO: 169 - protein, 12 aa, Fusobacterium nucleatum
INLGNGSVGLYS

SEQ ID NO: 170 - protein, 12 aa, Fusobacterium nucleatum
NLGNGSVGLYSK

SEQ ID NO: 171 - protein, 12 aa, Fusobacterium nucleatum
LGNGSVGLYSKG

SEQ ID NO: 172 - protein, 12 aa, Fusobacterium nucleatum
GNGSVGLYSKGQ

SEQ ID NO: 173 - protein, 12 aa, Fusobacterium nucleatum
NGSVGLYSKGQS

SEQ ID NO: 174 - protein, 12 aa, Fusobacterium nucleatum
GSVGLYSKGQSN

SEQ ID NO: 175 - protein, 12 aa, Fusobacterium nucleatum
SVGLYSKGQSNT

SEQ ID NO: 176 - protein, 12 aa, Fusobacterium nucleatum
NTSDKGNTNLDG

SEQ ID NO: 177 - protein, 12 aa, Fusobacterium nucleatum
TSDKGNTNLDGN

SEQ ID NO: 178 - protein, 12 aa, Fusobacterium nucleatum
NESNQANTQSEV

SEQ ID NO: 179 - protein, 12 aa, Fusobacterium nucleatum
ESNQANTQSEVT

SEQ ID NO: 180 - protein, 12 aa, Fusobacterium nucleatum
ESTAVGKGNVSA

SEQ ID NO: 181 - protein, 12 aa, Fusobacterium nucleatum
STAVGKGNVSAE

SEQ ID NO: 182 - protein, 12 aa, Fusobacterium nucleatum
IENKGGQITSES

SEQ ID NO: 183 - protein, 12 aa, Fusobacterium nucleatum
ENKGGQITSESG

SEQ ID NO: 184 - protein, 12 aa, Fusobacterium nucleatum
NKGGQITSESGA

SEQ ID NO: 185 - protein, 12 aa, Fusobacterium nucleatum
KGGQITSESGAT

SEQ ID NO: 186 - protein, 12 aa, Fusobacterium nucleatum
SVVNQETGISNL

SEQ ID NO: 187 - protein, 12 aa, Fusobacterium nucleatum
VVNQETGISNLP

SEQ ID NO: 188 - protein, 12 aa, Fusobacterium nucleatum
VNQETGISNLPN

SEQ ID NO: 189 - protein, 12 aa, Fusobacterium nucleatum
NQETGISNLPNA

SEQ ID NO: 190 - protein, 12 aa, Fusobacterium nucleatum
VNTSDKGNTNLD

SEQ ID NO: 191 - protein, 12 aa, Fusobacterium nucleatum
NTSDKGNTNLDG

SEQ ID NO: 192 - protein, 12 aa, Fusobacterium nucleatum
NESNQANTQSEV

SEQ ID NO: 193 - protein, 12 aa, Fusobacterium nucleatum
ESNQANTQSEVT

SEQ ID NO: 194 - protein, 12 aa, Fusobacterium nucleatum
SNQANTQSEVTN

SEQ ID NO: 195 - protein, 12 aa, Fusobacterium nucleatum
IENKGGQITSES

SEQ ID NO: 196 - protein, 12 aa, Fusobacterium nucleatum
ENKGGQITSESG

SEQ ID NO: 197 - protein, 12 aa, Fusobacterium nucleatum
VGLYSKGQSYTI

SEQ ID NO: 198 - protein, 12 aa, Fusobacterium nucleatum
GLYSKGQSYTIR

SEQ ID NO: 199 - protein, 12 aa, Fusobacterium nucleatum
LYSKGQSYTIRN

SEQ ID NO: 200 - protein, 12 aa, Fusobacterium nucleatum
KQINDKISSDPE

SEQ ID NO: 201 - protein, 12 aa, Fusobacterium nucleatum
QINDKISSDPEG

SEQ ID NO: 202 - protein, 12 aa, Fusobacterium nucleatum
INDKISSDPEGQ

SEQ ID NO: 203 - protein, 12 aa, Fusobacterium nucleatum
NDKISSDPEGQA

SEQ ID NO: 204 - protein, 12 aa, Fusobacterium nucleatum
DKISSDPEGQAL

SEQ ID NO: 205 - protein, 12 aa, Fusobacterium nucleatum
KNASSQANTQSD

SEQ ID NO: 206 - protein, 12 aa, Fusobacterium nucleatum
NASSQANTQSDV

SEQ ID NO: 207 - protein, 12 aa, Fusobacterium nucleatum
ASSQANTQSDVT

SEQ ID NO: 208 - protein, 12 aa, Fusobacterium nucleatum
SSQANTQSDVTN

SEQ ID NO: 209 - protein, 12 aa, Fusobacterium nucleatum
SQANTQSDVTNS

SEQ ID NO: 210 - protein, 12 aa, Fusobacterium nucleatum
VENDNSITTKEE

SEQ ID NO: 211 - protein, 12 aa, Fusobacterium nucleatum
ENDNSITTKEET

SEQ ID NO: 212 - protein, 12 aa, Fusobacterium nucleatum
NDNSITTKEETS

SEQ ID NO: 213 - protein, 12 aa, Fusobacterium nucleatum
DNSITTKEETSA

SEQ ID NO: 214 - protein, 12 aa, Fusobacterium nucleatum
NSITTKEETSAG

SEQ ID NO: 215 - protein, 12 aa, Fusobacterium nucleatum
SITTKEETSAGM

SEQ ID NO: 216 - protein, 12 aa, Fusobacterium nucleatum
ITTKEETSAGMY

SEQ ID NO: 217 - protein, 12 aa, Fusobacterium nucleatum
TTKEETSAGMYV

SEQ ID NO: 218 - protein, 12 aa, Fusobacterium nucleatum
TKEETSAGMYVK

SEQ ID NO: 219 - protein, 12 aa, Fusobacterium nucleatum
KEETSAGMYVKN

SEQ ID NO: 220 - protein, 12 aa, Fusobacterium nucleatum
EETSAGMYVKNG

SEQ ID NO: 221 - protein, 12 aa, Fusobacterium nucleatum
ETSAGMYVKNGN

SEQ ID NO: 222 - protein, 12 aa, Fusobacterium nucleatum
ESTAVGKGNVSA

SEQ ID NO: 223 - protein, 12 aa, Fusobacterium nucleatum
LKDSTVSNGSSA

SEQ ID NO: 224 - protein, 12 aa, Fusobacterium nucleatum
KDSTVSNGSSAV

SEQ ID NO: 225 - protein, 12 aa, Fusobacterium nucleatum
ENKGGQITSESG

SEQ ID NO: 226 - protein, 12 aa, Fusobacterium nucleatum
NKGGQITSESGA

SEQ ID NO: 227 - protein, 12 aa, Fusobacterium nucleatum
KGGQITSESGAT

SEQ ID NO: 228 - protein, 12 aa, Fusobacterium nucleatum
SVGLYSKGQSYT

SEQ ID NO: 229 - protein, 12 aa, Fusobacterium nucleatum
VGLYSKGQSYTV

SEQ ID NO: 230 - protein, 12 aa, Fusobacterium nucleatum
GLYSKGQSYTVR

SEQ ID NO: 231 - protein, 12 aa, Fusobacterium nucleatum
LYSKGQSYTVRN

SEQ ID NO: 232 - protein, 12 aa, Fusobacterium nucleatum
YSKGQSYTVRNS

SEQ ID NO: 233 - protein, 12 aa, Fusobacterium nucleatum
SKGQSYTVRNSV

SEQ ID NO: 234 - protein, 12 aa, Fusobacterium nucleatum
KGQSYTVRNSVT

SEQ ID NO: 235 - protein, 12 aa, Fusobacterium nucleatum
VNKTNIYNNTNT

SEQ ID NO: 236 - protein, 12 aa, Fusobacterium nucleatum
NKTNIYNNTNTG

SEQ ID NO: 237 - protein, 12 aa, Fusobacterium nucleatum
KEEESVGMYSSS

SEQ ID NO: 238 - protein, 12 aa, Fusobacterium nucleatum
EEESVGMYSSSS

SEQ ID NO: 239 - protein, 12 aa, Fusobacterium nucleatum
KLELETTSNSKI

SEQ ID NO: 240 - protein, 12 aa, Fusobacterium nucleatum
LELETTSNSKIS

SEQ ID NO: 241 - protein, 12 aa, Fusobacterium nucleatum
ELETTSNSKISL

SEQ ID NO: 242 - protein, 12 aa, Fusobacterium nucleatum
LETTSNSKISLG

SEQ ID NO: 243 - protein, 12 aa, Fusobacterium nucleatum
IENKGGQITSES

SEQ ID NO: 244 - protein, 12 aa, Fusobacterium nucleatum
ENKGGQITSESG

SEQ ID NO: 245 - protein, 12 aa, Fusobacterium nucleatum
NKGGQITSESGA

SEQ ID NO: 246 - protein, 12 aa, Fusobacterium nucleatum
KGGQITSESGAT

SEQ ID NO: 247 - protein, 12 aa, Fusobacterium nucleatum
INLGNGSVGLYS

SEQ ID NO: 248 - protein, 12 aa, Fusobacterium nucleatum
NLGNGSVGLYSK

SEQ ID NO: 249 - protein, 12 aa, Fusobacterium nucleatum
LGNGSVGLYSKG

SEQ ID NO: 250 - protein, 12 aa, Fusobacterium nucleatum
GNGSVGLYSKGQ

SEQ ID NO: 251 - protein, 12 aa, Fusobacterium nucleatum
NGSVGLYSKGQS

SEQ ID NO: 252 - protein, 12 aa, Fusobacterium nucleatum
GSVGLYSKGQSN

SEQ ID NO: 253 - protein, 12 aa, Fusobacterium nucleatum
SVGLYSKGQSNT

SEQ ID NO: 254 - protein, 12 aa, Fusobacterium nucleatum
VVNQETGISNLP

SEQ ID NO: 255 - protein, 12 aa, Fusobacterium nucleatum
VNQETGISNLPN

SEQ ID NO: 256 - protein, 12 aa, Fusobacterium nucleatum
LNKGQLTENGVN

SEQ ID NO: 257 - protein, 12 aa, Fusobacterium nucleatum
NKGQLTENGVNK

SEQ ID NO: 258 - protein, 12 aa, Fusobacterium nucleatum
KGQLTENGVNKG

SEQ ID NO: 259 - protein, 12 aa, Fusobacterium nucleatum
GQLTENGVNKGS

SEQ ID NO: 260 - protein, 12 aa, Fusobacterium nucleatum
NESNQANTQSEV

SEQ ID NO: 261 - protein, 12 aa, Fusobacterium nucleatum
ESNQANTQSEVT

SEQ ID NO: 262 - protein, 12 aa, Fusobacterium nucleatum
SEVVNSERISLA

SEQ ID NO: 263 - protein, 12 aa, Fusobacterium nucleatum
EVVNSERISLAN

SEQ ID NO: 264 - protein, 12 aa, Fusobacterium nucleatum
VVNSERISLANN

SEQ ID NO: 265 - protein, 12 aa, Fusobacterium nucleatum
VNSERISLANNS

SEQ ID NO: 266 - protein, 12 aa, Fusobacterium nucleatum
NSERISLANNSI

SEQ ID NO: 267 - protein, 12 aa, Fusobacterium nucleatum
SERISLANNSIS

SEQ ID NO: 268 - protein, 12 aa, Fusobacterium nucleatum
ERISLANNSIST

SEQ ID NO: 269 - protein, 12 aa, Fusobacterium nucleatum
RISLANNSISTS

SEQ ID NO: 270 - protein, 12 aa, Fusobacterium nucleatum
ISLANNSISTSS

SEQ ID NO: 271 - protein, 12 aa, Fusobacterium nucleatum
SLANNSISTSSD

SEQ ID NO: 272 - protein, 12 aa, Fusobacterium nucleatum
IENKGGQITSES

SEQ ID NO: 273 - protein, 12 aa, Fusobacterium nucleatum
ENKGGQITSESG

SEQ ID NO: 274 - protein, 12 aa, Fusobacterium nucleatum
NKGGQITSESGA

SEQ ID NO: 275 - protein, 12 aa, Fusobacterium nucleatum
KGGQITSESGAT

SEQ ID NO: 276 - protein, 12 aa, Fusobacterium nucleatum
SVVNQETGISNL

SEQ ID NO: 277 - protein, 12 aa, Fusobacterium nucleatum
VVNQETGISNLP

SEQ ID NO: 278 - protein, 12 aa, Fusobacterium nucleatum
VNQETGISNLPN

SEQ ID NO: 279 - protein, 12 aa, Fusobacterium nucleatum
NQETGISNLPNA

SEQ ID NO: 280 - protein, 12 aa, Fusobacterium nucleatum
VNTSDKGNTNLD

SEQ ID NO: 281 - protein, 12 aa, Fusobacterium nucleatum
NTSDKGNTNLDG

SEQ ID NO: 282 - protein, 12 aa, Fusobacterium nucleatum
NESNQANTQSEV

SEQ ID NO: 283 - protein, 12 aa, Fusobacterium nucleatum
ESNQANTQSEVT

SEQ ID NO: 284 - protein, 12 aa, Fusobacterium nucleatum
SNQANTQSEVTN

SEQ ID NO: 285 - protein, 12 aa, Fusobacterium nucleatum
IENKGGQITSES

SEQ ID NO: 286 - protein, 12 aa, Fusobacterium nucleatum
ENKGGQITSESG

SEQ ID NO: 287 - protein, 12 aa, Fusobacterium nucleatum
VGLYSKGQSYTI

SEQ ID NO: 288 - protein, 12 aa, Fusobacterium nucleatum
GLYSKGQSYTIR

SEQ ID NO: 289 - protein, 12 aa, Fusobacterium nucleatum
LYSKGQSYTIRN

SEQ ID NO: 290 - protein, 12 aa, Fusobacterium nucleatum
KQINDKISSDPE

SEQ ID NO: 291 - protein, 12 aa, Fusobacterium nucleatum
QINDKISSDPEG

SEQ ID NO: 292 - protein, 12 aa, Fusobacterium nucleatum
INDKISSDPEGQ

SEQ ID NO: 293 - protein, 12 aa, Fusobacterium nucleatum
NDKISSDPEGQA

SEQ ID NO: 294 - protein, 12 aa, Fusobacterium nucleatum
DKISSDPEGQAL

SEQ ID NO: 295 - protein, 18 aa, Homo sapiens
MAFLWLLSCWALLGTTFG

SEQ ID NO: 296 - protein, 15 aa, Homo sapiens
MNLLLILTFVAAAVA

SEQ ID NO: 297 - protein, 20 aa, Homo sapiens
MYRMQLLSCIALSLALVTNS

SEQ ID NO: 298 - protein, 18 aa, Homo sapiens
MKWVTFISLLFLFSSAYS

SEQ ID NO: 299 - protein, 19 aa, Homo sapiens
MDWTWRVFCLLAVTPGAHP

SEQ ID NO: 300 - protein, 19 aa, Homo sapiens
MAWSPLFLTLITHCAGSWA

SEQ ID NO: 301 - protein, 19 aa, Homo sapiens
MTRLTVLALLAGLLASSRA

SEQ ID NO: 302 - protein, 20 aa, Homo sapiens
MARPLCTLLLLMATLAGALA

SEQ ID NO: 303 - protein, 22 aa, Mus musculus
MDMRAPAGIFGFLLVLFPGYRS

SEQ ID NO: 304 - protein, 25 aa, Homo sapiens
MGVLLTQRTLLSLVLALLFPSMASM

SEQ ID NO: 305 - protein, 16 aa, Vesiculovirus indiana
MKCLLYLAFLFIGVNC

SEQ ID NO: 306 - protein, 20 aa, Mus musculus
METDTLLLWVLLLWVPGSTG

SEQ ID NO: 307 - protein, 19 aa, Mus musculus
MGWSCIILFLVATATGVHS

SEQ ID NO: 308 - protein, 17 aa, Homo sapiens
MRAWIFFLLCLAGRALA

SEQ ID NO: 309 - protein, 21 aa, synthetic construct
MWWRLWWLLLLLLLLWPMVWA

SEQ ID NO: 310 - protein, 22 aa, Homo sapiens
MDMRVPAQLLGLLLLWLRGARC

SEQ ID NO: 311 - protein, 16 aa, Homo sapiens
MPLLLLLPLLWAGALA

SEQ ID NO: 312 - protein, 23 aa, Homo sapiens
MDAMKRGLCCVLLLCGAVFVSPS

SEQ ID NO: 313 - protein, 17 aa, Gaussia princeps
MGVKVLFALICIAVAEA

SEQ ID NO: 314 - protein, 16 aa, Alphainfluenzavirus influenzae
MKTIIALSYIFCLVLG

SEQ ID NO: 315 - protein, 24 aa, Homo sapiens
MALWMRLLPLLALLALWGPDPAAA

SEQ ID NO: 316 - protein, 16 aa, Bombyx mori
MKPIFLVLLVVTSAYA

SEQ ID NO: 317 - protein, 9 aa, Fusobacterium nucleatum
NVQTKLNVL

SEQ ID NO: 318 - protein, 11 aa, Fusobacterium nucleatum
NENVTGLAGVA

SEQ ID NO: 319 - protein, 9 aa, Fusobacterium nucleatum
TETATPTVA

SEQ ID NO: 320 - protein, 9 aa, Fusobacterium nucleatum
TNKKQWFVK

SEQ ID NO: 321 - protein, 9 aa, Fusobacterium nucleatum
TREELKTSV

SEQ ID NO: 322 - protein, 11 aa, Fusobacterium nucleatum
FLYSNGKANII

SEQ ID NO: 323 - protein, 11 aa, Fusobacterium nucleatum
NADWFNIRGEK

SEQ ID NO: 324 - protein, 9 aa, Fusobacterium nucleatum
ETATPTVAT

SEQ ID NO: 325 - protein, 9 aa, Fusobacterium nucleatum
GEYKTDTAG

SEQ ID NO: 326 - protein, 10 aa, Fusobacterium nucleatum
KPQKYLFNGI

SEQ ID NO: 327 - protein, 10 aa, Fusobacterium nucleatum
TLGSNTIKLK

SEQ ID NO: 328 - protein, 9 aa, Fusobacterium nucleatum
YDMNALDSV

SEQ ID NO: 329 - protein, 9 aa, Fusobacterium nucleatum
LNAPSSAGI

SEQ ID NO: 330 - protein, 10 aa, Fusobacterium nucleatum
LEAVSSAGVY

SEQ ID NO: 331 - protein, 11 aa, Fusobacterium nucleatum
FLVVDEIFNAK

SEQ ID NO: 332 - protein, 9 aa, Fusobacterium nucleatum
DNYGQITGV

SEQ ID NO: 333 - protein, 9 aa, Fusobacterium nucleatum
VRSEEGRVY

SEQ ID NO: 334 - protein, 10 aa, Fusobacterium nucleatum
TTGIPNSNVK

SEQ ID NO: 335 - protein, 10 aa, Fusobacterium nucleatum
KTLRTSLEVA

SEQ ID NO: 336 - protein, 11 aa, Fusobacterium nucleatum
SEETSAGMLGK

SEQ ID NO: 337 - protein, 10 aa, Fusobacterium nucleatum
NVKVDLNVGI

SEQ ID NO: 338 - protein, 8 aa, Fusobacterium nucleatum
ASVGIYAK

SEQ ID NO: 339 - protein, 11 aa, Fusobacterium nucleatum
HNKMHRKFLVV

SEQ ID NO: 340 - protein, 9 aa, Fusobacterium nucleatum
TSDKGNTNL

SEQ ID NO: 341 - protein, 9 aa, Fusobacterium nucleatum
ITAKGSANF

SEQ ID NO: 342 - protein, 9 aa, Fusobacterium nucleatum
TEKKTSAGM

SEQ ID NO: 343 - protein, 11 aa, Fusobacterium nucleatum
FEAVNHGIIDF

SEQ ID NO: 344 - protein, 11 aa, Fusobacterium nucleatum
TGAYIEGNSIL

SEQ ID NO: 345 - protein, 10 aa, Fusobacterium nucleatum
ARVAGTTADW

SEQ ID NO: 346 - protein, 8 aa, Fusobacterium nucleatum
REELKTSV

SEQ ID NO: 347 - protein, 10 aa, Fusobacterium nucleatum
ITEKKTSAGM

SEQ ID NO: 348 - protein, 10 aa, Fusobacterium nucleatum
FLMLGVSAFS

SEQ ID NO: 349 - protein, 8 aa, Fusobacterium nucleatum
TAPNAPSI

SEQ ID NO: 350 - protein, 11 aa, Fusobacterium nucleatum
LTIAGKKTLGV

SEQ ID NO: 351 - protein, 10 aa, Fusobacterium nucleatum
NTKKSVGMYA

SEQ ID NO: 352 - protein, 10 aa, Fusobacterium nucleatum
TPTVATDGVV

SEQ ID NO: 353 - protein, 10 aa, Fusobacterium nucleatum
KYKVTNTGSG

SEQ ID NO: 354 - protein, 10 aa, Fusobacterium nucleatum
TGVAMAKLPY

SEQ ID NO: 355 - protein, 11 aa, Fusobacterium nucleatum
DFSAAEKSTAM

SEQ ID NO: 356 - protein, 10 aa, Fusobacterium nucleatum
AKDSEPTAVY

SEQ ID NO: 357 - protein, 11 aa, Fusobacterium nucleatum
YIEGNSALTGV

SEQ ID NO: 358 - protein, 11 aa, Fusobacterium nucleatum
KLPYTSFVKKT

SEQ ID NO: 359 - protein, 10 aa, Fusobacterium nucleatum
IFVRDNGVGK

SEQ ID NO: 360 - protein, 10 aa, Fusobacterium nucleatum
NTGDININSK

SEQ ID NO: 361 - protein, 9 aa, Fusobacterium nucleatum
GALKVEYGR

SEQ ID NO: 362 - protein, 10 aa, Fusobacterium nucleatum
ATKKLSTVNS

SEQ ID NO: 363 - protein, 9 aa, Fusobacterium nucleatum
SHESLIGMF

SEQ ID NO: 364 - protein, 10 aa, Fusobacterium nucleatum
EGRVYINANK

SEQ ID NO: 365 - protein, 11 aa, Fusobacterium nucleatum
SARAKNDGTIK

SEQ ID NO: 366 - protein, 9 aa, Fusobacterium nucleatum
EQRYDMNAL

SEQ ID NO: 367 - protein, 9 aa, Fusobacterium nucleatum
GMYVENSSA

SEQ ID NO: 368 - protein, 11 aa, Fusobacterium nucleatum
GMYGKGVGTTV

SEQ ID NO: 369 - protein, 9 aa, Fusobacterium nucleatum
DGIIGLLLK

SEQ ID NO: 370 - protein, 11 aa, Fusobacterium nucleatum
AKNSGTINLGK

SEQ ID NO: 371 - protein, 11 aa, Fusobacterium nucleatum
KYYTYGIGIKN

SEQ ID NO: 372 - protein, 9 aa, Fusobacterium nucleatum
LEAVSSAGV

SEQ ID NO: 373 - protein, 10 aa, Fusobacterium nucleatum
SGIGMLADGK

SEQ ID NO: 374 - protein, 11 aa, Fusobacterium nucleatum
GIFVRDNGVGK

SEQ ID NO: 375 - protein, 9 aa, Fusobacterium nucleatum
ALNTGTIDL

SEQ ID NO: 376 - protein, 11 aa, Fusobacterium nucleatum
SVAMYAENTNL

SEQ ID NO: 377 - protein, 11 aa, Fusobacterium nucleatum
YTDVSKIVYGI

SEQ ID NO: 378 - protein, 10 aa, Fusobacterium nucleatum
EGSAGVLAEK

SEQ ID NO: 379 - protein, 9 aa, Fusobacterium nucleatum
EFNGGTATI

SEQ ID NO: 380 - protein, 10 aa, Fusobacterium nucleatum
FLDQIQGRNF

SEQ ID NO: 381 - protein, 11 aa, Fusobacterium nucleatum
VYAKKGSTVNI

SEQ ID NO: 382 - protein, 9 aa, Fusobacterium nucleatum
ISANNSNHL

SEQ ID NO: 383 - protein, 9 aa, Fusobacterium nucleatum
FITKKIGAT

SEQ ID NO: 384 - protein, 9 aa, Fusobacterium nucleatum
LMEQGNQVV

SEQ ID NO: 385 - protein, 11 aa, Fusobacterium nucleatum
KITGYGVGVYL

SEQ ID NO: 386 - protein, 10 aa, Fusobacterium nucleatum
GIKVGNTVPR

SEQ ID NO: 387 - protein, 9 aa, Fusobacterium nucleatum
AESGIGMLA

SEQ ID NO: 388 - protein, 9 aa, Fusobacterium nucleatum
NQNRVAYYV

SEQ ID NO: 389 - protein, 9 aa, Fusobacterium nucleatum
LTNQNSIVV

SEQ ID NO: 390 - protein, 9 aa, Fusobacterium nucleatum
ATREELKTS

SEQ ID NO: 391 - protein, 9 aa, Fusobacterium nucleatum
IYIDADNSY

SEQ ID NO: 392 - protein, 9 aa, Fusobacterium nucleatum
MMITNDTTG

SEQ ID NO: 393 - protein, 11 aa, Fusobacterium nucleatum
AGMYVKNGTSK

SEQ ID NO: 394 - protein, 9 aa, Fusobacterium nucleatum
LYSADPTKF

SEQ ID NO: 395 - protein, 11 aa, Fusobacterium nucleatum
KESVGMYATNA

SEQ ID NO: 396 - protein, 9 aa, Fusobacterium nucleatum
DWFNIRGEK

SEQ ID NO: 397 - protein, 11 aa, Fusobacterium nucleatum
SIDSNGSSAVY

SEQ ID NO: 398 - protein, 11 aa, Fusobacterium nucleatum
FGLLNGNNTVT

SEQ ID NO: 399 - protein, 9 aa, Fusobacterium nucleatum
HINGNKNLK

SEQ ID NO: 400 - protein, 8 aa, Fusobacterium nucleatum
KESVGIYA

SEQ ID NO: 401 - protein, 10 aa, Fusobacterium nucleatum
DNAYNFTDGL

SEQ ID NO: 402 - protein, 9 aa, Fusobacterium nucleatum
KETSISSVS

SEQ ID NO: 403 - protein, 10 aa, Fusobacterium nucleatum
ISANNSNHLI

SEQ ID NO: 404 - protein, 8 aa, Fusobacterium nucleatum
IYAPKANI

SEQ ID NO: 405 - protein, 9 aa, Fusobacterium nucleatum
TLTGVKTIK

SEQ ID NO: 406 - protein, 10 aa, Fusobacterium nucleatum
ASAKINLGKV

SEQ ID NO: 407 - protein, 11 aa, Fusobacterium nucleatum
STIKESLIGMF

SEQ ID NO: 408 - protein, 8 aa, Fusobacterium nucleatum
GASHLIAF

SEQ ID NO: 409 - protein, 9 aa, Fusobacterium nucleatum
KSGEMKLEV

SEQ ID NO: 410 - protein, 9 aa, Fusobacterium nucleatum
KFKDIGNSK

SEQ ID NO: 411 - protein, 9 aa, Fusobacterium nucleatum
NKTVTNSPL

SEQ ID NO: 412 - protein, 9 aa, Fusobacterium nucleatum
GSAGVLAEK

SEQ ID NO: 413 - protein, 9 aa, Fusobacterium nucleatum
LGMSDIGFY

SEQ ID NO: 414 - protein, 10 aa, Fusobacterium nucleatum
IGKRSLGMLA

SEQ ID NO: 415 - protein, 10 aa, Fusobacterium nucleatum
NPSDKDKYAI

SEQ ID NO: 416 - protein, 9 aa, Fusobacterium nucleatum
NTKNSAGIM

SEQ ID NO: 417 - protein, 11 aa, Fusobacterium nucleatum
NNTDVNKTNIY

SEQ ID NO: 418 - protein, 11 aa, Fusobacterium nucleatum
HLRNSWSNPSK

SEQ ID NO: 419 - protein, 10 aa, Fusobacterium nucleatum
KITGYGVGVY

SEQ ID NO: 420 - protein, 10 aa, Fusobacterium nucleatum
ILGSKGSNLK

SEQ ID NO: 421 - protein, 10 aa, Fusobacterium nucleatum
NKMHRKFLVV

SEQ ID NO: 422 - protein, 10 aa, Fusobacterium nucleatum
YGKNSDITAK

SEQ ID NO: 423 - protein, 10 aa, Fusobacterium nucleatum
IATGKTVTSV

SEQ ID NO: 424 - protein, 11 aa, Fusobacterium nucleatum
TSTGTITLENK

SEQ ID NO: 425 - protein, 10 aa, Fusobacterium nucleatum
LIDADNSYGV

SEQ ID NO: 426 - protein, 9 aa, Fusobacterium nucleatum
LLTQAYDEM

SEQ ID NO: 427 - protein, 10 aa, Fusobacterium nucleatum
SIDSNGSSAV

SEQ ID NO: 428 - protein, 9 aa, Fusobacterium nucleatum
SQLIIGTEY

SEQ ID NO: 429 - protein, 10 aa, Fusobacterium nucleatum
SKYYTYGIGV

SEQ ID NO: 430 - protein, 10 aa, Fusobacterium nucleatum
QRVQATGNIL

SEQ ID NO: 431 - protein, 11 aa, Fusobacterium nucleatum
NARIVATSIGK

SEQ ID NO: 432 - protein, 10 aa, Fusobacterium nucleatum
KTASVKNTKD

SEQ ID NO: 433 - protein, 10 aa, Fusobacterium nucleatum
VSEETSAGML

SEQ ID NO: 434 - protein, 11 aa, Fusobacterium nucleatum
KSAGVYVKLDK

SEQ ID NO: 435 - protein, 11 aa, Fusobacterium nucleatum
ANFSNKGVLAY

SEQ ID NO: 436 - protein, 10 aa, Fusobacterium nucleatum
SFVKKTDNAW

SEQ ID NO: 437 - protein, 9 aa, Fusobacterium nucleatum
IYADAQGTA

SEQ ID NO: 438 - protein, 10 aa, Fusobacterium nucleatum
MNALDSVEKR

SEQ ID NO: 439 - protein, 10 aa, Fusobacterium nucleatum
KALNTGTIDL

SEQ ID NO: 440 - protein, 11 aa, Fusobacterium nucleatum
GRVYINANKNL

SEQ ID NO: 441 - protein, 9 aa, Fusobacterium nucleatum
VKALNTGTI

SEQ ID NO: 442 - protein, 10 aa, Fusobacterium nucleatum
VGLYSADPTK

SEQ ID NO: 443 - protein, 10 aa, Fusobacterium nucleatum
GKEFRLSEGF

SEQ ID NO: 444 - protein, 11 aa, Fusobacterium nucleatum
AENSIGIMGEK

SEQ ID NO: 445 - protein, 8 aa, Fusobacterium nucleatum
HENEDIKL

SEQ ID NO: 446 - protein, 11 aa, Fusobacterium nucleatum
SLNWTISGDIF

SEQ ID NO: 447 - protein, 10 aa, Fusobacterium nucleatum
GAYIEGNSTL

SEQ ID NO: 448 - protein, 11 aa, Fusobacterium nucleatum
EFRLSEDFSIR

SEQ ID NO: 449 - protein, 11 aa, Fusobacterium nucleatum
AKRYKSVKYSL

SEQ ID NO: 450 - protein, 9 aa, Fusobacterium nucleatum
SVNDGSITA

SEQ ID NO: 451 - protein, 9 aa, Fusobacterium nucleatum
GRVYINANK

SEQ ID NO: 452 - protein, 10 aa, Fusobacterium nucleatum
PTNEVEILAR

SEQ ID NO: 453 - protein, 11 aa, Fusobacterium nucleatum
LEVKHNDYLSI

SEQ ID NO: 454 - protein, 10 aa, Fusobacterium nucleatum
TVGKDGIAFY

SEQ ID NO: 455 - protein, 9 aa, Fusobacterium nucleatum
ALAGANIGK

SEQ ID NO: 456 - protein, 10 aa, Fusobacterium nucleatum
LNWTISGDMF

SEQ ID NO: 457 - protein, 10 aa, Fusobacterium nucleatum
VSKIVYGIGM

SEQ ID NO: 458 - protein, 10 aa, Fusobacterium nucleatum
KLNVLRNENK

SEQ ID NO: 459 - protein, 8 aa, Fusobacterium nucleatum
LEVKHNDY

SEQ ID NO: 460 - protein, 10 aa, Fusobacterium nucleatum
ANGASHLIAF

SEQ ID NO: 461 - protein, 10 aa, Fusobacterium nucleatum
LLTQAYDEMM

SEQ ID NO: 462 - protein, 10 aa, Fusobacterium nucleatum
SDVSKIVYGI

SEQ ID NO: 463 - protein, 9 aa, Fusobacterium nucleatum
GTNKDYEGV

SEQ ID NO: 464 - protein, 9 aa, Fusobacterium nucleatum
YGIGVKNEI

SEQ ID NO: 465 - protein, 11 aa, Fusobacterium nucleatum
TTVENKGTISL

SEQ ID NO: 466 - protein, 10 aa, Fusobacterium nucleatum
KSIGMYGKGI

SEQ ID NO: 467 - protein, 11 aa, Fusobacterium nucleatum
AMLGEVKSLVT

SEQ ID NO: 468 - protein, 10 aa, Fusobacterium nucleatum
ILAENGVGIF

SEQ ID NO: 469 - protein, 9 aa, Fusobacterium nucleatum
QLKPEDPHY

SEQ ID NO: 470 - protein, 10 aa, Fusobacterium nucleatum
KGIKVGNTVA

SEQ ID NO: 471 - protein, 9 aa, Fusobacterium nucleatum
LRTSVGVAY

SEQ ID NO: 472 - protein, 9 aa, Fusobacterium nucleatum
RGKNDGTIK

SEQ ID NO: 473 - protein, 9 aa, Fusobacterium nucleatum
IYSTTNSNV

SEQ ID NO: 474 - protein, 10 aa, Fusobacterium nucleatum
SITGTKDKAR

SEQ ID NO: 475 - protein, 9 aa, Fusobacterium nucleatum
GNNLCKVEK

SEQ ID NO: 476 - protein, 10 aa, Fusobacterium nucleatum
TKEEESVGMY

SEQ ID NO: 477 - protein, 10 aa, Fusobacterium nucleatum
GVAMAKLPYT

SEQ ID NO: 478 - protein, 10 aa, Fusobacterium nucleatum
QASKISIGAK

SEQ ID NO: 479 - protein, 9 aa, Fusobacterium nucleatum
DSNTSKLDY

SEQ ID NO: 480 - protein, 9 aa, Fusobacterium nucleatum
VTGLVGVAV

SEQ ID NO: 481 - protein, 10 aa, Fusobacterium nucleatum
KNSVGGLQTK

SEQ ID NO: 482 - protein, 9 aa, Fusobacterium nucleatum
YTSGVYNTG

SEQ ID NO: 483 - protein, 8 aa, Fusobacterium nucleatum
GQDSTGLF

SEQ ID NO: 484 - protein, 9 aa, Fusobacterium nucleatum
SSTNGNRNW

SEQ ID NO: 485 - protein, 11 aa, Fusobacterium nucleatum
FSTGKGNIGIY

SEQ ID NO: 486 - protein, 10 aa, Fusobacterium nucleatum
TDVSKIVYGI

SEQ ID NO: 487 - protein, 10 aa, Fusobacterium nucleatum
TEKKTSAGIL

SEQ ID NO: 488 - protein, 10 aa, Fusobacterium nucleatum
VTLGTNTIKL

SEQ ID NO: 489 - protein, 11 aa, Fusobacterium nucleatum
ISTRIDKGIGI

SEQ ID NO: 490 - protein, 9 aa, Fusobacterium nucleatum
KVHVKDQGI

SEQ ID NO: 491 - protein, 9 aa, Fusobacterium nucleatum
GINEGKINV

SEQ ID NO: 492 - protein, 9 aa, Fusobacterium nucleatum
FTNNSKISL

SEQ ID NO: 493 - protein, 10 aa, Fusobacterium nucleatum
ESVGMYATNA

SEQ ID NO: 494 - protein, 11 aa, Fusobacterium nucleatum
MAGDSSTVTNK

SEQ ID NO: 495 - protein, 9 aa, Fusobacterium nucleatum
ATNKGRVYV

SEQ ID NO: 496 - protein, 11 aa, Fusobacterium nucleatum
IGILADKATGI

SEQ ID NO: 497 - protein, 8 aa, Fusobacterium nucleatum
KSIGIYSK

SEQ ID NO: 498 - protein, 9 aa, Fusobacterium nucleatum
IYLDGSRAT

SEQ ID NO: 499 - protein, 11 aa, Fusobacterium nucleatum
VTAEKGVGIFV

SEQ ID NO: 500 - protein, 9 aa, Fusobacterium nucleatum
KTITLSAKK

SEQ ID NO: 501 - protein, 9 aa, Fusobacterium nucleatum
KMTGSPSVA

SEQ ID NO: 502 - protein, 8 aa, Fusobacterium nucleatum
VFNKGVPK

SEQ ID NO: 503 - protein, 9 aa, Fusobacterium nucleatum
KPRMVLTHV

SEQ ID NO: 504 - protein, 9 aa, Fusobacterium nucleatum
KTVTNSPLL

SEQ ID NO: 505 - protein, 10 aa, Fusobacterium nucleatum
NSKSSVGMLA

SEQ ID NO: 506 - protein, 11 aa, Fusobacterium nucleatum
MSDIGFYVDTL

SEQ ID NO: 507 - protein, 9 aa, Fusobacterium nucleatum
VATDGVVGI

SEQ ID NO: 508 - protein, 10 aa, Fusobacterium nucleatum
VLDKEFSHLR

SEQ ID NO: 509 - protein, 9 aa, Fusobacterium nucleatum
KNSAGIMVV

SEQ ID NO: 510 - protein, 9 aa, Fusobacterium nucleatum
VLMKADNQK

SEQ ID NO: 511 - protein, 9 aa, Fusobacterium nucleatum
NEVEILARI

SEQ ID NO: 512 - protein, 10 aa, Fusobacterium nucleatum
KNEGSAGVLA

SEQ ID NO: 513 - protein, 9 aa, Fusobacterium nucleatum
YRHYFGIKT

SEQ ID NO: 514 - protein, 10 aa, Fusobacterium nucleatum
KGELDIDTHI

SEQ ID NO: 515 - protein, 8 aa, Fusobacterium nucleatum
NEGSAGVL

SEQ ID NO: 516 - protein, 10 aa, Fusobacterium nucleatum
LENKESVGIF

SEQ ID NO: 517 - protein, 9 aa, Fusobacterium nucleatum
EYSEKTNKK

SEQ ID NO: 518 - protein, 8 aa, Fusobacterium nucleatum
RSIAKRYK

SEQ ID NO: 519 - protein, 8 aa, Fusobacterium nucleatum
TLKAKAIL

SEQ ID NO: 520 - protein, 10 aa, Fusobacterium nucleatum
AGMLGKVKSA

SEQ ID NO: 521 - protein, 10 aa, Fusobacterium nucleatum
APASPDPNKL

SEQ ID NO: 522 - protein, 8 aa, Fusobacterium nucleatum
YFGTKTLR

SEQ ID NO: 523 - protein, 9 aa, Fusobacterium nucleatum
NSLEPTIGI

SEQ ID NO: 524 - protein, 11 aa, Fusobacterium nucleatum
LETTSNSKISL

SEQ ID NO: 525 - protein, 9 aa, Fusobacterium nucleatum
DIFVGYNKM

SEQ ID NO: 526 - protein, 10 aa, Fusobacterium nucleatum
SKDSNKIKTF

SEQ ID NO: 527 - protein, 9 aa, Fusobacterium nucleatum
GVAMAKLPY

SEQ ID NO: 528 - protein, 11 aa, Fusobacterium nucleatum
VFAGVPTMPVR

SEQ ID NO: 529 - protein, 11 aa, Fusobacterium nucleatum
GVNSNFTNNSK

SEQ ID NO: 530 - protein, 9 aa, Fusobacterium nucleatum
GTINLTASA

SEQ ID NO: 531 - protein, 9 aa, Fusobacterium nucleatum
FYIKNGGDF

SEQ ID NO: 532 - protein, 10 aa, Fusobacterium nucleatum
NNTSDKINIV

SEQ ID NO: 533 - protein, 10 aa, Fusobacterium nucleatum
IFNKLNSIGK

SEQ ID NO: 534 - protein, 9 aa, Fusobacterium nucleatum
KLGRGTGWY

SEQ ID NO: 535 - protein, 10 aa, Fusobacterium nucleatum
MYGKGVGTTV

SEQ ID NO: 536 - protein, 10 aa, Fusobacterium nucleatum
GATQNTMLYL

SEQ ID NO: 537 - protein, 10 aa, Fusobacterium nucleatum
EMNGGKIHVK

SEQ ID NO: 538 - protein, 9 aa, Fusobacterium nucleatum
GEGASIFYA

SEQ ID NO: 539 - protein, 9 aa, Fusobacterium nucleatum
YAVNGQDTK

SEQ ID NO: 540 - protein, 9 aa, Fusobacterium nucleatum
VTNTGNITV

SEQ ID NO: 541 - protein, 10 aa, Fusobacterium nucleatum
YSTTNSNVEM

SEQ ID NO: 542 - protein, 10 aa, Fusobacterium nucleatum
VTNSGKIEVK

SEQ ID NO: 543 - protein, 11 aa, Fusobacterium nucleatum
VSLGNDSVFLY

SEQ ID NO: 544 - protein, 10 aa, Fusobacterium nucleatum
KSGEVRLEVK

SEQ ID NO: 545 - protein, 10 aa, Fusobacterium nucleatum
SNGKAIINNK

SEQ ID NO: 546 - protein, 9 aa, Fusobacterium nucleatum
DEMMGHQYA

SEQ ID NO: 547 - protein, 8 aa, Fusobacterium nucleatum
YKSVKYSL

SEQ ID NO: 548 - protein, 11 aa, Fusobacterium nucleatum
GTNTIKLKGTK

SEQ ID NO: 549 - protein, 9 aa, Fusobacterium nucleatum
VAVMNGSTL

SEQ ID NO: 550 - protein, 10 aa, Fusobacterium nucleatum
GSANFSNKGV

SEQ ID NO: 551 - protein, 10 aa, Fusobacterium nucleatum
YGRVSKIKEK

SEQ ID NO: 552 - protein, 8 aa, Fusobacterium nucleatum
ATKNVGIY

SEQ ID NO: 553 - protein, 11 aa, Fusobacterium nucleatum
KARVAGTTADW

SEQ ID NO: 554 - protein, 11 aa, Fusobacterium nucleatum
HLRDSWSNPSK

SEQ ID NO: 555 - protein, 9 aa, Fusobacterium nucleatum
STIKHTSGT

SEQ ID NO: 556 - protein, 10 aa, Fusobacterium nucleatum
TVATDGVVGI

SEQ ID NO: 557 - protein, 11 aa, Fusobacterium nucleatum
KLPYTSFVNKT

SEQ ID NO: 558 - protein, 9 aa, Fusobacterium nucleatum
QASKISIGA

SEQ ID NO: 559 - protein, 11 aa, Fusobacterium nucleatum
SWSNPSKDSNK

SEQ ID NO: 560 - protein, 10 aa, Fusobacterium nucleatum
YGFILNNTDV

SEQ ID NO: 561 - protein, 9 aa, Fusobacterium nucleatum
EQIGKLIGK

SEQ ID NO: 562 - protein, 9 aa, Fusobacterium nucleatum
QQRVQATGI

SEQ ID NO: 563 - protein, 11 aa, Fusobacterium nucleatum
SFGEGASLFYA

SEQ ID NO: 564 - protein, 8 aa, Fusobacterium nucleatum
QESAGIYA

SEQ ID NO: 565 - protein, 10 aa, Fusobacterium nucleatum
INIADSANSL

SEQ ID NO: 566 - protein, 9 aa, Fusobacterium nucleatum
KARGILGVN

SEQ ID NO: 567 - protein, 9 aa, Fusobacterium nucleatum
ISDSEVEQI

SEQ ID NO: 568 - protein, 9 aa, Fusobacterium nucleatum
FSIRPYGAL

SEQ ID NO: 569 - protein, 9 aa, Fusobacterium nucleatum
INLNGSGSF

SEQ ID NO: 570 - protein, 10 aa, Fusobacterium nucleatum
KNSGTINLGK

SEQ ID NO: 571 - protein, 10 aa, Fusobacterium nucleatum
NKVEEAVGVF

SEQ ID NO: 572 - protein, 9 aa, Fusobacterium nucleatum
NKMHRKFLV

SEQ ID NO: 573 - protein, 9 aa, Fusobacterium nucleatum
AKVGLFKSV

SEQ ID NO: 574 - protein, 9 aa, Fusobacterium nucleatum
NSNLINNSK

SEQ ID NO: 575 - protein, 10 aa, Fusobacterium nucleatum
GVYVDDGATF

SEQ ID NO: 576 - protein, 8 aa, Fusobacterium nucleatum
KLPYTSFV

SEQ ID NO: 577 - protein, 9 aa, Fusobacterium nucleatum
LEKKESVGM

SEQ ID NO: 578 - protein, 11 aa, Fusobacterium nucleatum
TTIGIYSDGNA

SEQ ID NO: 579 - protein, 10 aa, Fusobacterium nucleatum
KEDRRGNVKF

SEQ ID NO: 580 - protein, 10 aa, Fusobacterium nucleatum
LLQEIQEVKL

SEQ ID NO: 581 - protein, 9 aa, Fusobacterium nucleatum
ITNTGTGTK

SEQ ID NO: 582 - protein, 9 aa, Fusobacterium nucleatum
EESVGMYSS

SEQ ID NO: 583 - protein, 9 aa, Fusobacterium nucleatum
TNAEKIENK

SEQ ID NO: 584 - protein, 9 aa, Fusobacterium nucleatum
GNSTLTGVK

SEQ ID NO: 585 - protein, 11 aa, Fusobacterium nucleatum
ANSLEPTIGIY

SEQ ID NO: 586 - protein, 10 aa, Fusobacterium nucleatum
TSISSVSKNV

SEQ ID NO: 587 - protein, 11 aa, Fusobacterium nucleatum
QRYDMNALDSV

SEQ ID NO: 588 - protein, 8 aa, Fusobacterium nucleatum
KMSGSPSV

SEQ ID NO: 589 - protein, 9 aa, Fusobacterium nucleatum
ESAGIYAPK

SEQ ID NO: 590 - protein, 10 aa, Fusobacterium nucleatum
YAKETSISSV

SEQ ID NO: 591 - protein, 11 aa, Fusobacterium nucleatum
SADPTKFNNTF

SEQ ID NO: 592 - protein, 8 aa, Fusobacterium nucleatum
EIGTELAY

SEQ ID NO: 593 - protein, 10 aa, Fusobacterium nucleatum
TISGDMFVGY

SEQ ID NO: 594 - protein, 9 aa, Fusobacterium nucleatum
GMYATNANV

SEQ ID NO: 595 - protein, 11 aa, Fusobacterium nucleatum
LDGSRATATNK

SEQ ID NO: 596 - protein, 11 aa, Fusobacterium nucleatum
YLFNGIYTRGN

SEQ ID NO: 597 - protein, 11 aa, Fusobacterium nucleatum
ELEAVSSAGVY

SEQ ID NO: 598 - protein, 10 aa, Fusobacterium nucleatum
DTTGIPNSNV

SEQ ID NO: 599 - protein, 10 aa, Fusobacterium nucleatum
KMTGSPSVAM

SEQ ID NO: 600 - protein, 10 aa, Fusobacterium nucleatum
FSAAEKSTAM

SEQ ID NO: 601 - protein, 10 aa, Fusobacterium nucleatum
GIPTTVNVTA

SEQ ID NO: 602 - protein, 9 aa, Fusobacterium nucleatum
DTINVNGKE

SEQ ID NO: 603 - protein, 9 aa, Fusobacterium nucleatum
TNSPLLSKY

SEQ ID NO: 604 - protein, 10 aa, Fusobacterium nucleatum
KTDTAGVIDY

SEQ ID NO: 605 - protein, 11 aa, Fusobacterium nucleatum
GIIGKLGSEII

SEQ ID NO: 606 - protein, 11 aa, Fusobacterium nucleatum
KSVVNNGELTI

SEQ ID NO: 607 - protein, 10 aa, Fusobacterium nucleatum
KSAGIYSKKE

SEQ ID NO: 608 - protein, 11 aa, Fusobacterium nucleatum
NKKTITLSAKK

SEQ ID NO: 609 - protein, 11 aa, Fusobacterium nucleatum
ITAGKSGVGIF

SEQ ID NO: 610 - protein, 9 aa, Fusobacterium nucleatum
EPTVQTLEA

SEQ ID NO: 611 - protein, 9 aa, Fusobacterium nucleatum
VELGKNSTF

SEQ ID NO: 612 - protein, 10 aa, Fusobacterium nucleatum
IGRSALSDSK

SEQ ID NO: 613 - protein, 11 aa, Fusobacterium nucleatum
IYKESGKLTIK

SEQ ID NO: 614 - protein, 9 aa, Fusobacterium nucleatum
FAGVPTMPV

SEQ ID NO: 615 - protein, 9 aa, Fusobacterium nucleatum
DYLSIRPEI

SEQ ID NO: 616 - protein, 11 aa, Fusobacterium nucleatum
GQNASSITNNK

SEQ ID NO: 617 - protein, 10 aa, Fusobacterium nucleatum
TSEIIVNKEA

SEQ ID NO: 618 - protein, 11 aa, Fusobacterium nucleatum
DKEFSHLRNSW

SEQ ID NO: 619 - protein, 11 aa, Fusobacterium nucleatum
SVGMYSSSSLK

SEQ ID NO: 620 - protein, 9 aa, Fusobacterium nucleatum
VAKNNGTLI

SEQ ID NO: 621 - protein, 10 aa, Fusobacterium nucleatum
STQNTMLYLK

SEQ ID NO: 622 - protein, 9 aa, Fusobacterium nucleatum
VGLFKSVPF

SEQ ID NO: 623 - protein, 9 aa, Fusobacterium nucleatum
ISWKDVTPA

SEQ ID NO: 624 - protein, 10 aa, Fusobacterium nucleatum
GTVSLGNDSV

SEQ ID NO: 625 - protein, 11 aa, Fusobacterium nucleatum
TGVYVDDGATF

SEQ ID NO: 626 - protein, 10 aa, Fusobacterium nucleatum
MDVADGYTGA

SEQ ID NO: 627 - protein, 8 aa, Fusobacterium nucleatum
ELAYRHYF

SEQ ID NO: 628 - protein, 10 aa, Fusobacterium nucleatum
LRNSWSNPSK

SEQ ID NO: 629 - protein, 9 aa, Fusobacterium nucleatum
SEVTNSGLV

SEQ ID NO: 630 - protein, 8 aa, Fusobacterium nucleatum
YIEGNSAL

SEQ ID NO: 631 - protein, 8 aa, Fusobacterium nucleatum
EALLTQAY

SEQ ID NO: 632 - protein, 11 aa, Fusobacterium nucleatum
YIKNDGEIRIY

SEQ ID NO: 633 - protein, 10 aa, Fusobacterium nucleatum
VFAGVPTMPV

SEQ ID NO: 634 - protein, 9 aa, Fusobacterium nucleatum
ETDIQSYIK

SEQ ID NO: 635 - protein, 9 aa, Fusobacterium nucleatum
DAASTSVLV

SEQ ID NO: 636 - protein, 9 aa, Fusobacterium nucleatum
WKDVSQAYI

SEQ ID NO: 637 - protein, 10 aa, Fusobacterium nucleatum
ENTSTGTISL

SEQ ID NO: 638 - protein, 9 aa, Fusobacterium nucleatum
TVRNTVTNT

SEQ ID NO: 639 - protein, 11 aa, Fusobacterium nucleatum
NSTFGLLNGNK

SEQ ID NO: 640 - protein, 9 aa, Fusobacterium nucleatum
ANIGKITGY

SEQ ID NO: 641 - protein, 10 aa, Fusobacterium nucleatum
NVTGLVGVAV

SEQ ID NO: 642 - protein, 9 aa, Fusobacterium nucleatum
SGSPSVAMY

SEQ ID NO: 643 - protein, 9 aa, Fusobacterium nucleatum
NEEALLTQA

SEQ ID NO: 644 - protein, 9 aa, Fusobacterium nucleatum
PEIGTELAY

SEQ ID NO: 645 - protein, 10 aa, Fusobacterium nucleatum
SEIINSGIIK

SEQ ID NO: 646 - protein, 10 aa, Fusobacterium nucleatum
KSGVGIFADK

SEQ ID NO: 647 - protein, 10 aa, Fusobacterium nucleatum
ILARISPKEV

SEQ ID NO: 648 - protein, 9 aa, Fusobacterium nucleatum
NFVSNAESI

SEQ ID NO: 649 - protein, 9 aa, Fusobacterium nucleatum
ATQNTMLYL

SEQ ID NO: 650 - protein, 9 aa, Fusobacterium nucleatum
SEEVNTEQM

SEQ ID NO: 651 - protein, 10 aa, Fusobacterium nucleatum
EASVGIYAKE

SEQ ID NO: 652 - protein, 9 aa, Fusobacterium nucleatum
TAVYAVNGT

SEQ ID NO: 653 - protein, 9 aa, Fusobacterium nucleatum
TVNIDHWTF

SEQ ID NO: 654 - protein, 9 aa, Fusobacterium nucleatum
IVHNTFKFK

SEQ ID NO: 655 - protein, 10 aa, Fusobacterium nucleatum
YEGAPASPDP

SEQ ID NO: 656 - protein, 9 aa, Fusobacterium nucleatum
LYSNGKANI

SEQ ID NO: 657 - protein, 10 aa, Fusobacterium nucleatum
MKLEVKENDY

SEQ ID NO: 658 - protein, 11 aa, Fusobacterium nucleatum
AENIGTINLTA

SEQ ID NO: 659 - protein, 8 aa, Fusobacterium nucleatum
FLKDANFV

SEQ ID NO: 660 - protein, 11 aa, Fusobacterium nucleatum
GFSIRPYGALK

SEQ ID NO: 661 - protein, 11 aa, Fusobacterium nucleatum
QAYDEMMGHQY

SEQ ID NO: 662 - protein, 10 aa, Fusobacterium nucleatum
VTKQAISLNI

SEQ ID NO: 663 - protein, 10 aa, Fusobacterium nucleatum
NSQLIIGTEY

SEQ ID NO: 664 - protein, 9 aa, Fusobacterium nucleatum
ESSVGIYSK

SEQ ID NO: 665 - protein, 10 aa, Fusobacterium nucleatum
NESAVINSGR

SEQ ID NO: 666 - protein, 10 aa, Fusobacterium nucleatum
RLEVKHNDYL

SEQ ID NO: 667 - protein, 10 aa, Fusobacterium nucleatum
SFGIVTVFNK

SEQ ID NO: 668 - protein, 9 aa, Fusobacterium nucleatum
ENNSLNWTI

SEQ ID NO: 669 - protein, 10 aa, Fusobacterium nucleatum
SSSTNGNRNW

SEQ ID NO: 670 - protein, 10 aa, Fusobacterium nucleatum
VEILARISPK

SEQ ID NO: 671 - protein, 11 aa, Fusobacterium nucleatum
GMYVKNGTSKA

SEQ ID NO: 672 - protein, 10 aa, Fusobacterium nucleatum
EIVSSKENLK

SEQ ID NO: 673 - protein, 9 aa, Fusobacterium nucleatum
VTNSGLVKM

SEQ ID NO: 674 - protein, 9 aa, Fusobacterium nucleatum
IIDFSAAEK

SEQ ID NO: 675 - protein, 9 aa, Fusobacterium nucleatum
NSQESAGIY

SEQ ID NO: 676 - protein, 9 aa, Fusobacterium nucleatum
ILNNTDPNK

SEQ ID NO: 677 - protein, 10 aa, Fusobacterium nucleatum
IYKESGKLTI

SEQ ID NO: 678 - protein, 9 aa, Fusobacterium nucleatum
KNLKPRMVL

SEQ ID NO: 679 - protein, 8 aa, Fusobacterium nucleatum
KETSISSV

SEQ ID NO: 680 - protein, 10 aa, Fusobacterium nucleatum
ETTSNSKISL

SEQ ID NO: 681 - protein, 11 aa, Fusobacterium nucleatum
SNGSSAVYVSK

SEQ ID NO: 682 - protein, 9 aa, Fusobacterium nucleatum
VVDEIFHAK

SEQ ID NO: 683 - protein, 10 aa, Fusobacterium nucleatum
SLTWIATPVL

SEQ ID NO: 684 - protein, 9 aa, Fusobacterium nucleatum
FVGYNKMHR

SEQ ID NO: 685 - protein, 9 aa, Fusobacterium nucleatum
YTNTDAGTV

SEQ ID NO: 686 - protein, 10 aa, Fusobacterium nucleatum
NKARVAGTTA

SEQ ID NO: 687 - protein, 10 aa, Fusobacterium nucleatum
NENVTGLAGV

SEQ ID NO: 688 - protein, 9 aa, Fusobacterium nucleatum
ARLENEKAL

SEQ ID NO: 689 - protein, 9 aa, Fusobacterium nucleatum
SLFYATLKA

SEQ ID NO: 690 - protein, 10 aa, Fusobacterium nucleatum
KTGSAGIYSI

SEQ ID NO: 691 - protein, 9 aa, Fusobacterium nucleatum
IKVGNTVAA

SEQ ID NO: 692 - protein, 11 aa, Fusobacterium nucleatum
GKITGYGVGVY

SEQ ID NO: 693 - protein, 11 aa, Fusobacterium nucleatum
DIGFYVDTLGR

SEQ ID NO: 694 - protein, 10 aa, Fusobacterium nucleatum
GTELAYKHYF

SEQ ID NO: 695 - protein, 9 aa, Fusobacterium nucleatum
FNKLNSIGK

SEQ ID NO: 696 - protein, 9 aa, Fusobacterium nucleatum
APSAPTAPS

SEQ ID NO: 697 - protein, 11 aa, Fusobacterium nucleatum
IYAPKANISKV

SEQ ID NO: 698 - protein, 11 aa, Fusobacterium nucleatum
LEAVSSAGVYA

SEQ ID NO: 699 - protein, 10 aa, Fusobacterium nucleatum
GMYGEANSQL

SEQ ID NO: 700 - protein, 10 aa, Fusobacterium nucleatum
IDADNSYGVL

SEQ ID NO: 701 - protein, 10 aa, Fusobacterium nucleatum
KTITLSGEKG

SEQ ID NO: 702 - protein, 10 aa, Fusobacterium nucleatum
NTNLTTNSKI

SEQ ID NO: 703 - protein, 9 aa, Fusobacterium nucleatum
ISSSTNGNR

SEQ ID NO: 704 - protein, 10 aa, Fusobacterium nucleatum
VEMNGGKIHV

SEQ ID NO: 705 - protein, 9 aa, Fusobacterium nucleatum
AENKGIILA

SEQ ID NO: 706 - protein, 10 aa, Fusobacterium nucleatum
GASHLIAFYI

SEQ ID NO: 707 - protein, 9 aa, Fusobacterium nucleatum
YYTYGIGIK

SEQ ID NO: 708 - protein, 11 aa, Fusobacterium nucleatum
REEIVSSKENL

SEQ ID NO: 709 - protein, 10 aa, Fusobacterium nucleatum
VGYNKMHRKF

SEQ ID NO: 710 - protein, 10 aa, Fusobacterium nucleatum
HNKMHRKFLV

SEQ ID NO: 711 - protein, 9 aa, Fusobacterium nucleatum
SAATNEKNI

SEQ ID NO: 712 - protein, 10 aa, Fusobacterium nucleatum
STAMFINSAR

SEQ ID NO: 713 - protein, 10 aa, Fusobacterium nucleatum
KIKEKSGEMK

SEQ ID NO: 714 - protein, 9 aa, Fusobacterium nucleatum
NPSKDSNKI

SEQ ID NO: 715 - protein, 11 aa, Fusobacterium nucleatum
TGAYIEGNSAL

SEQ ID NO: 716 - protein, 9 aa, Fusobacterium nucleatum
KTETATPTV

SEQ ID NO: 717 - protein, 11 aa, Fusobacterium nucleatum
VAMAKLPYTSF

SEQ ID NO: 718 - protein, 11 aa, Fusobacterium nucleatum
AKLPYTSFVNK

SEQ ID NO: 719 - protein, 9 aa, Fusobacterium nucleatum
SKTGSAGIY

SEQ ID NO: 720 - protein, 9 aa, Fusobacterium nucleatum
KTIKVTAES

SEQ ID NO: 721 - protein, 9 aa, Fusobacterium nucleatum
AADNGGYIK

SEQ ID NO: 722 - protein, 10 aa, Fusobacterium nucleatum
HVKDQGIGIY

SEQ ID NO: 723 - protein, 9 aa, Fusobacterium nucleatum
TEFNGGTAT

SEQ ID NO: 724 - protein, 9 aa, Fusobacterium nucleatum
ESVGIFAKN

SEQ ID NO: 725 - protein, 8 aa, Fusobacterium nucleatum
IFVGYNKM

SEQ ID NO: 726 - protein, 9 aa, Fusobacterium nucleatum
TGYGVGVYL

SEQ ID NO: 727 - protein, 9 aa, Fusobacterium nucleatum
MLAKDTNST

SEQ ID NO: 728 - protein, 10 aa, Fusobacterium nucleatum
MTGVYVDDGA

SEQ ID NO: 729 - protein, 10 aa, Fusobacterium nucleatum
LENKEAVGIF

SEQ ID NO: 730 - protein, 10 aa, Fusobacterium nucleatum
ITTPITAGKS

SEQ ID NO: 731 - protein, 9 aa, Fusobacterium nucleatum
TQANTQSEV

SEQ ID NO: 732 - protein, 8 aa, Fusobacterium nucleatum
DIFVGYNK

SEQ ID NO: 733 - protein, 9 aa, Fusobacterium nucleatum
YTGIVHNRF

SEQ ID NO: 734 - protein, 10 aa, Fusobacterium nucleatum
SIGAKSYGFI

SEQ ID NO: 735 - protein, 9 aa, Fusobacterium nucleatum
VAYENELGR

SEQ ID NO: 736 - protein, 8 aa, Fusobacterium nucleatum
IKNLRLEL

SEQ ID NO: 737 - protein, 8 aa, Fusobacterium nucleatum
SLFYATLK

SEQ ID NO: 738 - protein, 8 aa, Fusobacterium nucleatum
VSNGSSAV

SEQ ID NO: 739 - protein, 10 aa, Fusobacterium nucleatum
STAKLSLTNK

SEQ ID NO: 740 - protein, 8 aa, Fusobacterium nucleatum
NLKPRMVL

SEQ ID NO: 741 - protein, 9 aa, Fusobacterium nucleatum
QSYTVRNSV

SEQ ID NO: 742 - protein, 9 aa, Fusobacterium nucleatum
KAKYAIGIY

SEQ ID NO: 743 - protein, 10 aa, Fusobacterium nucleatum
STIKHTSGTI

SEQ ID NO: 744 - protein, 9 aa, Fusobacterium nucleatum
GLLNGNNTV

SEQ ID NO: 745 - protein, 9 aa, Fusobacterium nucleatum
KESVGIFAK

SEQ ID NO: 746 - protein, 9 aa, Fusobacterium nucleatum
VIKNYGEIK

SEQ ID NO: 747 - protein, 9 aa, Fusobacterium nucleatum
NLRLELIQL

SEQ ID NO: 748 - protein, 11 aa, Fusobacterium nucleatum
SNGKANIINNR

SEQ ID NO: 749 - protein, 11 aa, Fusobacterium nucleatum
TELAYRHYFGI

SEQ ID NO: 750 - protein, 10 aa, Fusobacterium nucleatum
HRKFLVVDEI

SEQ ID NO: 751 - protein, 11 aa, Fusobacterium nucleatum
IGMFAQAEAGK

SEQ ID NO: 752 - protein, 10 aa, Fusobacterium nucleatum
GIVHNRFKFK

SEQ ID NO: 753 - protein, 10 aa, Fusobacterium nucleatum
GLFLKDANFV

SEQ ID NO: 754 - protein, 11 aa, Fusobacterium nucleatum
AEGIKNHGMTI

SEQ ID NO: 755 - protein, 10 aa, Fusobacterium nucleatum
TTADWFNIRG

SEQ ID NO: 756 - protein, 9 aa, Fusobacterium nucleatum
SIGAKSYGF

SEQ ID NO: 757 - protein, 11 aa, Fusobacterium nucleatum
IELEAVSSAGV

SEQ ID NO: 758 - protein, 10 aa, Fusobacterium nucleatum
GQSNTVRNTV

SEQ ID NO: 759 - protein, 9 aa, Fusobacterium nucleatum
YTDVSKIVY

SEQ ID NO: 760 - protein, 10 aa, Fusobacterium nucleatum
SAVYVSNGGK

SEQ ID NO: 761 - protein, 11 aa, Fusobacterium nucleatum
IYSKKEGGAKL

SEQ ID NO: 762 - protein, 10 aa, Fusobacterium nucleatum
ISLNITEPTV

SEQ ID NO: 763 - protein, 9 aa, Fusobacterium nucleatum
KFLVVDEIF

SEQ ID NO: 764 - protein, 9 aa, Fusobacterium nucleatum
TLQGTGNGI

SEQ ID NO: 765 - protein, 10 aa, Fusobacterium nucleatum
VGVFAGVPTM

SEQ ID NO: 766 - protein, 10 aa, Fusobacterium nucleatum
NFTDGLEQRY

SEQ ID NO: 767 - protein, 10 aa, Fusobacterium nucleatum
SEKTNKKQWF

SEQ ID NO: 768 - protein, 11 aa, Fusobacterium nucleatum
TTQDEESAGMY

SEQ ID NO: 769 - protein, 11 aa, Fusobacterium nucleatum
TLSAKKSTGIF

SEQ ID NO: 770 - protein, 10 aa, Fusobacterium nucleatum
DNIGILANKR

SEQ ID NO: 771 - protein, 11 aa, Fusobacterium nucleatum
TFGLLNGNNTV

SEQ ID NO: 772 - protein, 9 aa, Fusobacterium nucleatum
QYANVQQRV

SEQ ID NO: 773 - protein, 10 aa, Fusobacterium nucleatum
GMAGKATTVT

SEQ ID NO: 774 - protein, 9 aa, Fusobacterium nucleatum
GTITTTDSY

SEQ ID NO: 775 - protein, 10 aa, Fusobacterium nucleatum
SEVEQIGKLI

SEQ ID NO: 776 - protein, 10 aa, Fusobacterium nucleatum
ITGYGVGVYL

SEQ ID NO: 777 - protein, 11 aa, Fusobacterium nucleatum
SEIIVNKEASV

SEQ ID NO: 778 - protein, 9 aa, Fusobacterium nucleatum
VEIASGKTL

SEQ ID NO: 779 - protein, 11 aa, Fusobacterium nucleatum
VLDNYGQITGV

SEQ ID NO: 780 - protein, 9 aa, Fusobacterium nucleatum
ARSENEKAL

SEQ ID NO: 781 - protein, 10 aa, Fusobacterium nucleatum
DSYAGRDGKV

SEQ ID NO: 782 - protein, 11 aa, Fusobacterium nucleatum
EAVGVFAGVPT

SEQ ID NO: 783 - protein, 10 aa, Fusobacterium nucleatum
PQKYLFNGIY

SEQ ID NO: 784 - protein, 9 aa, Fusobacterium nucleatum
STYKGSGDK

SEQ ID NO: 785 - protein, 9 aa, Fusobacterium nucleatum
YLDGSRATA

SEQ ID NO: 786 - protein, 8 aa, Fusobacterium nucleatum
KSAGVYVK

SEQ ID NO: 787 - protein, 8 aa, Fusobacterium nucleatum
GEKSIGIY

SEQ ID NO: 788 - protein, 9 aa, Fusobacterium nucleatum
STGMYLINA

SEQ ID NO: 789 - protein, 10 aa, Fusobacterium nucleatum
ALLTQAYDEM

SEQ ID NO: 790 - protein, 9 aa, Fusobacterium nucleatum
IGIYAPGGK

SEQ ID NO: 791 - protein, 9 aa, Fusobacterium nucleatum
HVINGETSI

SEQ ID NO: 792 - protein, 10 aa, Fusobacterium nucleatum
TGVYVDDGAK

SEQ ID NO: 793 - protein, 9 aa, Fusobacterium nucleatum
RIVATSIGK

SEQ ID NO: 794 - protein, 10 aa, Fusobacterium nucleatum
NEQTLLTQAY

SEQ ID NO: 795 - protein, 9 aa, Fusobacterium nucleatum
YAKNESSHA

SEQ ID NO: 796 - protein, 11 aa, Fusobacterium nucleatum
KQWFVKGDVIK

SEQ ID NO: 797 - protein, 9 aa, Fusobacterium nucleatum
QLDGAGTKV

SEQ ID NO: 798 - protein, 10 aa, Fusobacterium nucleatum
NVTALTNRDY

SEQ ID NO: 799 - protein, 9 aa, Fusobacterium nucleatum
YLFNGIYTR

SEQ ID NO: 800 - protein, 9 aa, Fusobacterium nucleatum
FSNKGVLAY

SEQ ID NO: 801 - protein, 9 aa, Fusobacterium nucleatum
AEKGVGIFV

SEQ ID NO: 802 - protein, 9 aa, Fusobacterium nucleatum
VSEETSAGM

SEQ ID NO: 803 - protein, 10 aa, Fusobacterium nucleatum
SGLNETTGTI

SEQ ID NO: 804 - protein, 8 aa, Fusobacterium nucleatum
RLSEDFSI

SEQ ID NO: 805 - protein, 10 aa, Fusobacterium nucleatum
TSAGILAEID

SEQ ID NO: 806 - protein, 9 aa, Fusobacterium nucleatum
EVTKQAISL

SEQ ID NO: 807 - protein, 9 aa, Fusobacterium nucleatum
AVTASTAKL

SEQ ID NO: 808 - protein, 9 aa, Fusobacterium nucleatum
GETDIQSYI

SEQ ID NO: 809 - protein, 10 aa, Fusobacterium nucleatum
TNPDPNKLEL

SEQ ID NO: 810 - protein, 9 aa, Fusobacterium nucleatum
IYAKNESSH

SEQ ID NO: 811 - protein, 10 aa, Fusobacterium nucleatum
FGEGASIFYA

SEQ ID NO: 812 - protein, 9 aa, Fusobacterium nucleatum
YGQITGVAM

SEQ ID NO: 813 - protein, 10 aa, Fusobacterium nucleatum
NEKALKGLRL

SEQ ID NO: 814 - protein, 9 aa, Fusobacterium nucleatum
QRVQATGNI

SEQ ID NO: 815 - protein, 9 aa, Fusobacterium nucleatum
KKSAGIIGK

SEQ ID NO: 816 - protein, 10 aa, Fusobacterium nucleatum
VIIRGKRDSK

SEQ ID NO: 817 - protein, 10 aa, Fusobacterium nucleatum
TETATPTVAT

SEQ ID NO: 818 - protein, 11 aa, Fusobacterium nucleatum
AGSLTWIATPV

SEQ ID NO: 819 - protein, 9 aa, Fusobacterium nucleatum
MTIWQEGNF

SEQ ID NO: 820 - protein, 9 aa, Fusobacterium nucleatum
NGDAISTAV

SEQ ID NO: 821 - protein, 9 aa, Fusobacterium nucleatum
TTADWFNIR

SEQ ID NO: 822 - protein, 10 aa, Fusobacterium nucleatum
ALAGADIGKI

SEQ ID NO: 823 - protein, 9 aa, Fusobacterium nucleatum
ISHLGNLGA

SEQ ID NO: 824 - protein, 10 aa, Fusobacterium nucleatum
AESGIGMLAD

SEQ ID NO: 825 - protein, 10 aa, Fusobacterium nucleatum
NGKANIINNR

SEQ ID NO: 826 - protein, 9 aa, Fusobacterium nucleatum
TMGRVLMKA

SEQ ID NO: 827 - protein, 9 aa, Fusobacterium nucleatum
IEVAQKASA

SEQ ID NO: 828 - protein, 10 aa, Fusobacterium nucleatum
YGQITGVAMA

SEQ ID NO: 829 - protein, 9 aa, Fusobacterium nucleatum
EEESVGMYS

SEQ ID NO: 830 - protein, 9 aa, Fusobacterium nucleatum
YVDDGAKFI

SEQ ID NO: 831 - protein, 8 aa, Fusobacterium nucleatum
MAGKATTV

SEQ ID NO: 832 - protein, 9 aa, Fusobacterium nucleatum
FVNKTDNAW

SEQ ID NO: 833 - protein, 11 aa, Fusobacterium nucleatum
GSTVNIDHWTF

SEQ ID NO: 834 - protein, 9 aa, Fusobacterium nucleatum
VFLKGSQSF

SEQ ID NO: 835 - protein, 10 aa, Fusobacterium nucleatum
SEVTNSGLVK

SEQ ID NO: 836 - protein, 10 aa, Fusobacterium nucleatum
ESAGVYAPKA

SEQ ID NO: 837 - protein, 10 aa, Fusobacterium nucleatum
NIQGVGVYAK

SEQ ID NO: 838 - protein, 10 aa, Fusobacterium nucleatum
KVNQNRVAYY

SEQ ID NO: 839 - protein, 10 aa, Fusobacterium nucleatum
NSYGVLIRGK

SEQ ID NO: 840 - protein, 9 aa, Fusobacterium nucleatum
LEVAYENEL

SEQ ID NO: 841 - protein, 10 aa, Fusobacterium nucleatum
AKVAYTNADW

SEQ ID NO: 842 - protein, 9 aa, Fusobacterium nucleatum
NTSGGVITL

SEQ ID NO: 843 - protein, 9 aa, Fusobacterium nucleatum
GMAADNGGY

SEQ ID NO: 844 - protein, 11 aa, Fusobacterium nucleatum
YFYDHWGSEYK

SEQ ID NO: 845 - protein, 10 aa, Fusobacterium nucleatum
SIGIYGFYNK

SEQ ID NO: 846 - protein, 10 aa, Fusobacterium nucleatum
GSNIENNTTF

SEQ ID NO: 847 - protein, 10 aa, Fusobacterium nucleatum
VGLLQEIQEV

SEQ ID NO: 848 - protein, 9 aa, Fusobacterium nucleatum
LETTSNSKI

SEQ ID NO: 849 - protein, 11 aa, Fusobacterium nucleatum
NENVTGLVGVA

SEQ ID NO: 850 - protein, 9 aa, Fusobacterium nucleatum
GINTGNINV

SEQ ID NO: 851 - protein, 9 aa, Fusobacterium nucleatum
KEKIKNLRL

SEQ ID NO: 852 - protein, 9 aa, Fusobacterium nucleatum
SGVGIFADK

SEQ ID NO: 853 - protein, 10 aa, Fusobacterium nucleatum
DENNSLNWTI

SEQ ID NO: 854 - protein, 9 aa, Fusobacterium nucleatum
GRISLSNSS

SEQ ID NO: 855 - protein, 11 aa, Fusobacterium nucleatum
WNFADGLEQRY

SEQ ID NO: 856 - protein, 9 aa, Fusobacterium nucleatum
YFGAKTLST

SEQ ID NO: 857 - protein, 10 aa, Fusobacterium nucleatum
IKLGQDSTGL

SEQ ID NO: 858 - protein, 10 aa, Fusobacterium nucleatum
EAVNHGIIDF

SEQ ID NO: 859 - protein, 9 aa, Fusobacterium nucleatum
VADTASAKI

SEQ ID NO: 860 - protein, 10 aa, Fusobacterium nucleatum
LRLELIQLME

SEQ ID NO: 861 - protein, 9 aa, Fusobacterium nucleatum
YSKGQSNTV

SEQ ID NO: 862 - protein, 10 aa, Fusobacterium nucleatum
INQKKSVGIY

SEQ ID NO: 863 - protein, 10 aa, Fusobacterium nucleatum
INLGKVNQNR

SEQ ID NO: 864 - protein, 10 aa, Fusobacterium nucleatum
APSSAGIQLK

SEQ ID NO: 865 - protein, 9 aa, Fusobacterium nucleatum
SRATATNKI

SEQ ID NO: 866 - protein, 9 aa, Fusobacterium nucleatum
LLNDTNGNI

SEQ ID NO: 867 - protein, 10 aa, Fusobacterium nucleatum
EEMSAGMYVK

SEQ ID NO: 868 - protein, 8 aa, Fusobacterium nucleatum
KMHRKFLV

SEQ ID NO: 869 - protein, 9 aa, Fusobacterium nucleatum
NGDAASTSV

SEQ ID NO: 870 - protein, 10 aa, Fusobacterium nucleatum
SKESAGVYAP

SEQ ID NO: 871 - protein, 10 aa, Fusobacterium nucleatum
GMAADNGGYI

SEQ ID NO: 872 - protein, 9 aa, Fusobacterium nucleatum
KNIGILANK

SEQ ID NO: 873 - protein, 8 aa, Fusobacterium nucleatum
SSVGIYSK

SEQ ID NO: 874 - protein, 11 aa, Fusobacterium nucleatum
LGVFLKGSQSF

SEQ ID NO: 875 - protein, 10 aa, Fusobacterium nucleatum
IYSKKEGGAK

SEQ ID NO: 876 - protein, 10 aa, Fusobacterium nucleatum
GTITLKNSTV

SEQ ID NO: 877 - protein, 8 aa, Fusobacterium nucleatum
IANSANSF

SEQ ID NO: 878 - protein, 10 aa, Fusobacterium nucleatum
KLTSIAGSLT

SEQ ID NO: 879 - protein, 9 aa, Fusobacterium nucleatum
FYNKDTRKY

SEQ ID NO: 880 - protein, 10 aa, Fusobacterium nucleatum
ENTNLTTNSK

SEQ ID NO: 881 - protein, 10 aa, Fusobacterium nucleatum
SVPFDENNSL

SEQ ID NO: 882 - protein, 9 aa, Fusobacterium nucleatum
MITNDTTGI

SEQ ID NO: 883 - protein, 9 aa, Fusobacterium nucleatum
VNQNRVAYY

SEQ ID NO: 884 - protein, 9 aa, Fusobacterium nucleatum
GFYNKDTRK

SEQ ID NO: 885 - protein, 9 aa, Fusobacterium nucleatum
TLRTSVGVA

SEQ ID NO: 886 - protein, 9 aa, Fusobacterium nucleatum
TKFNNTFEI

SEQ ID NO: 887 - protein, 9 aa, Fusobacterium nucleatum
STALNNARI

SEQ ID NO: 888 - protein, 8 aa, Fusobacterium nucleatum
KESAGVYA

SEQ ID NO: 889 - protein, 10 aa, Fusobacterium nucleatum
STGKGNIGIY

SEQ ID NO: 890 - protein, 9 aa, Fusobacterium nucleatum
TWQEGNFEA

SEQ ID NO: 891 - protein, 10 aa, Fusobacterium nucleatum
ENTNLTTDSK

SEQ ID NO: 892 - protein, 11 aa, Fusobacterium nucleatum
TDKIQSMTGVY

SEQ ID NO: 893 - protein, 8 aa, Fusobacterium nucleatum
YLSIKPEV

SEQ ID NO: 894 - protein, 9 aa, Fusobacterium nucleatum
VKYSLGLAI

SEQ ID NO: 895 - protein, 11 aa, Fusobacterium nucleatum
ANGASHLIAFY

SEQ ID NO: 896 - protein, 10 aa, Fusobacterium nucleatum
TVENKGTISL

SEQ ID NO: 897 - protein, 10 aa, Fusobacterium nucleatum
KVTLGTNTIK

SEQ ID NO: 898 - protein, 9 aa, Fusobacterium nucleatum
NEKNIGILA

SEQ ID NO: 899 - protein, 9 aa, Fusobacterium nucleatum
LTWIATPVL

SEQ ID NO: 900 - protein, 9 aa, Fusobacterium nucleatum
VTITVKNGK

SEQ ID NO: 901 - protein, 11 aa, Fusobacterium nucleatum
ELAYKHYFGAK

SEQ ID NO: 902 - protein, 11 aa, Fusobacterium nucleatum
ARVAGTTADWF

SEQ ID NO: 903 - protein, 10 aa, Fusobacterium nucleatum
LIGMFAQAEA

SEQ ID NO: 904 - protein, 8 aa, Fusobacterium nucleatum
TEYSTGMY

SEQ ID NO: 905 - protein, 9 aa, Fusobacterium nucleatum
NAYNFTDGL

SEQ ID NO: 906 - protein, 9 aa, Fusobacterium nucleatum
KLGQDSTGL

SEQ ID NO: 907 - protein, 9 aa, Fusobacterium nucleatum
KATNKGRIL

SEQ ID NO: 908 - protein, 10 aa, Fusobacterium nucleatum
TTAGTGIFIT

SEQ ID NO: 909 - protein, 9 aa, Fusobacterium nucleatum
GIKNHSMTW

SEQ ID NO: 910 - protein, 11 aa, Fusobacterium nucleatum
ITVGKDGIAFY

SEQ ID NO: 911 - protein, 9 aa, Fusobacterium nucleatum
GFNNADASR

SEQ ID NO: 912 - protein, 9 aa, Fusobacterium nucleatum
SDSKYTSGV

SEQ ID NO: 913 - protein, 10 aa, Fusobacterium nucleatum
GSLTWIATPV

SEQ ID NO: 914 - protein, 10 aa, Fusobacterium nucleatum
TLNGKKATGI

SEQ ID NO: 915 - protein, 10 aa, Fusobacterium nucleatum
ENKGIILAEK

SEQ ID NO: 916 - protein, 8 aa, Fusobacterium nucleatum
QKASAGIY

SEQ ID NO: 917 - protein, 9 aa, Fusobacterium nucleatum
NWTISGDIF

SEQ ID NO: 918 - protein, 11 aa, Fusobacterium nucleatum
ILFLMLGVSAF

SEQ ID NO: 919 - protein, 11 aa, Fusobacterium nucleatum
KLIGKESNLGL

SEQ ID NO: 920 - protein, 9 aa, Fusobacterium nucleatum
HESLIGMFA

SEQ ID NO: 921 - protein, 9 aa, Fusobacterium nucleatum
SEVEQIGKL

SEQ ID NO: 922 - protein, 9 aa, Fusobacterium nucleatum
TSKTGSAGI

SEQ ID NO: 923 - protein, 9 aa, Fusobacterium nucleatum
TATDKIQSM

SEQ ID NO: 924 - protein, 9 aa, Fusobacterium nucleatum
SVFLYSNGK

SEQ ID NO: 925 - protein, 9 aa, Fusobacterium nucleatum
QNSIVVNTK

SEQ ID NO: 926 - protein, 11 aa, Fusobacterium nucleatum
NLKPKMVLTHV

SEQ ID NO: 927 - protein, 11 aa, Fusobacterium nucleatum
RPYGALKVEYG

SEQ ID NO: 928 - protein, 11 aa, Fusobacterium nucleatum
SSITNNKTITL

SEQ ID NO: 929 - protein, 9 aa, Fusobacterium nucleatum
VEKKSAGIL

SEQ ID NO: 930 - protein, 8 aa, Fusobacterium nucleatum
FLKGSQSF

SEQ ID NO: 931 - protein, 10 aa, Fusobacterium nucleatum
ARIVATSIGK

SEQ ID NO: 932 - protein, 10 aa, Fusobacterium nucleatum
LYLKNSIAQL

SEQ ID NO: 933 - protein, 9 aa, Fusobacterium nucleatum
VYAKKGSTV

SEQ ID NO: 934 - protein, 10 aa, Fusobacterium nucleatum
IYKQNGKATI

SEQ ID NO: 935 - protein, 8 aa, Fusobacterium nucleatum
TTDSYAGR

SEQ ID NO: 936 - protein, 11 aa, Fusobacterium nucleatum
QLMEQGNQVVK

SEQ ID NO: 937 - protein, 9 aa, Fusobacterium nucleatum
KEKQLQAKV

SEQ ID NO: 938 - protein, 10 aa, Fusobacterium nucleatum
VYSDVSKIVY

SEQ ID NO: 939 - protein, 11 aa, Fusobacterium nucleatum
IVLDKEFSHLR

SEQ ID NO: 940 - protein, 9 aa, Fusobacterium nucleatum
GTISLDGSR

SEQ ID NO: 941 - protein, 8 aa, Fusobacterium nucleatum
YSADPTKF

SEQ ID NO: 942 - protein, 9 aa, Fusobacterium nucleatum
NSKESIGML

SEQ ID NO: 943 - protein, 8 aa, Fusobacterium nucleatum
KETVGMMI

SEQ ID NO: 944 - protein, 9 aa, Fusobacterium nucleatum
EEGRVYINA

SEQ ID NO: 945 - protein, 9 aa, Fusobacterium nucleatum
ILATNSNLT

SEQ ID NO: 946 - protein, 9 aa, Fusobacterium nucleatum
AQAEAGKKA

SEQ ID NO: 947 - protein, 11 aa, Fusobacterium nucleatum
IYSKTPSNVEI

SEQ ID NO: 948 - protein, 9 aa, Fusobacterium nucleatum
GTKTLRTSV

SEQ ID NO: 949 - protein, 9 aa, Fusobacterium nucleatum
FEAVNHGTI

SEQ ID NO: 950 - protein, 9 aa, Fusobacterium nucleatum
YTGIVHNTF

SEQ ID NO: 951 - protein, 11 aa, Fusobacterium nucleatum
AYRHYFGTKTL

SEQ ID NO: 952 - protein, 9 aa, Fusobacterium nucleatum
LSGEKGIGM

SEQ ID NO: 953 - protein, 11 aa, Fusobacterium nucleatum
GETSIVTGKTV

SEQ ID NO: 954 - protein, 9 aa, Fusobacterium nucleatum
TVFNKGVPK

SEQ ID NO: 955 - protein, 10 aa, Fusobacterium nucleatum
VAYENELGRV

SEQ ID NO: 956 - protein, 10 aa, Fusobacterium nucleatum
SFGEGASIFY

SEQ ID NO: 957 - protein, 10 aa, Fusobacterium nucleatum
KIVYGIGMAA

SEQ ID NO: 958 - protein, 9 aa, Fusobacterium nucleatum
SLDGSRATA

SEQ ID NO: 959 - protein, 9 aa, Fusobacterium nucleatum
YFYDHWGSE

SEQ ID NO: 960 - protein, 11 aa, Fusobacterium nucleatum
FYATLKAKAIL

SEQ ID NO: 961 - protein, 8 aa, Fusobacterium nucleatum
RTSLEVAY

SEQ ID NO: 962 - protein, 8 aa, Fusobacterium nucleatum
FHAKSKYY

SEQ ID NO: 963 - protein, 9 aa, Fusobacterium nucleatum
GVYAPKANI

SEQ ID NO: 964 - protein, 9 aa, Fusobacterium nucleatum
AKKGSTVNI

SEQ ID NO: 965 - protein, 10 aa, Fusobacterium nucleatum
VTAESGVGIF

SEQ ID NO: 966 - protein, 10 aa, Fusobacterium nucleatum
QLMEQGNQVV

SEQ ID NO: 967 - protein, 10 aa, Fusobacterium nucleatum
DYEGVTITVK

SEQ ID NO: 968 - protein, 9 aa, Fusobacterium nucleatum
KVYSDVSKI

SEQ ID NO: 969 - protein, 10 aa, Fusobacterium nucleatum
SKFVSHLGNL

SEQ ID NO: 970 - protein, 10 aa, Fusobacterium nucleatum
NFTNTGNIYV

SEQ ID NO: 971 - protein, 10 aa, Fusobacterium nucleatum
STNGNRNWGL

SEQ ID NO: 972 - protein, 11 aa, Fusobacterium nucleatum
FNGIYTRGNWK

SEQ ID NO: 973 - protein, 9 aa, Fusobacterium nucleatum
GASGDKATL

SEQ ID NO: 974 - protein, 10 aa, Fusobacterium nucleatum
SNKIKTFGMK

SEQ ID NO: 975 - protein, 11 aa, Fusobacterium nucleatum
GLFLKDANFVS

SEQ ID NO: 976 - protein, 9 aa, Fusobacterium nucleatum
NSPLLSKYL

SEQ ID NO: 977 - protein, 10 aa, Fusobacterium nucleatum
GMYLINAEKI

SEQ ID NO: 978 - protein, 9 aa, Fusobacterium nucleatum
VNVTALTNR

SEQ ID NO: 979 - protein, 9 aa, Fusobacterium nucleatum
SHLIAFYIK

SEQ ID NO: 980 - protein, 10 aa, Fusobacterium nucleatum
RAATGTNKDY

SEQ ID NO: 981 - protein, 10 aa, Fusobacterium nucleatum
EANGGTVSGL

SEQ ID NO: 982 - protein, 8 aa, Fusobacterium nucleatum
RSEEGRVY

SEQ ID NO: 983 - protein, 9 aa, Fusobacterium nucleatum
AGKIALEKK

SEQ ID NO: 984 - protein, 9 aa, Fusobacterium nucleatum
KITGYGVGV

SEQ ID NO: 985 - protein, 9 aa, Fusobacterium nucleatum
EQMKAVPTR

SEQ ID NO: 986 - protein, 9 aa, Fusobacterium nucleatum
DSKGNVERY

SEQ ID NO: 987 - protein, 10 aa, Fusobacterium nucleatum
AFYIKNGGDF

SEQ ID NO: 988 - protein, 9 aa, Fusobacterium nucleatum
ATKNVGIYA

SEQ ID NO: 989 - protein, 9 aa, Fusobacterium nucleatum
TAESGVGIF

SEQ ID NO: 990 - protein, 9 aa, Fusobacterium nucleatum
AKLPYTSFV

SEQ ID NO: 991 - protein, 9 aa, Fusobacterium nucleatum
SEVEKIGKL

SEQ ID NO: 992 - protein, 11 aa, Fusobacterium nucleatum
GEGASLFYATL

SEQ ID NO: 993 - protein, 10 aa, Fusobacterium nucleatum
VKYSLGLAIL

SEQ ID NO: 994 - protein, 11 aa, Fusobacterium nucleatum
KTLRTSLEVAY

SEQ ID NO: 995 - protein, 10 aa, Fusobacterium nucleatum
GNRNWGLVDL

SEQ ID NO: 996 - protein, 9 aa, Fusobacterium nucleatum
TSAGMLGKV

SEQ ID NO: 997 - protein, 10 aa, Fusobacterium nucleatum
MTIWQEGNFE

SEQ ID NO: 998 - protein, 10 aa, Fusobacterium nucleatum
KVRGKGTWGI

SEQ ID NO: 999 - protein, 9 aa, Fusobacterium nucleatum
LENHGKILI

SEQ ID NO: 1000 - protein, 11 aa, Fusobacterium nucleatum
GEYKTDTAGVI

SEQ ID NO: 1001 - protein, 10 aa, Fusobacterium nucleatum
KVNENVTGLV

SEQ ID NO: 1002 - protein, 11 aa, Fusobacterium nucleatum
GVKNEIGKEFR

SEQ ID NO: 1003 - protein, 9 aa, Fusobacterium nucleatum
SSITNNKTI

SEQ ID NO: 1004 - protein, 11 aa, Fusobacterium nucleatum
NIGIYAQGNYK

SEQ ID NO: 1005 - protein, 10 aa, Fusobacterium nucleatum
INSKESAGVY

SEQ ID NO: 1006 - protein, 8 aa, Fusobacterium nucleatum
ESVGIYAK

SEQ ID NO: 1007 - protein, 10 aa, Fusobacterium nucleatum
IKDEKSVGIY

SEQ ID NO: 1008 - protein, 11 aa, Fusobacterium nucleatum
AAMLGEVKSLV

SEQ ID NO: 1009 - protein, 9 aa, Fusobacterium nucleatum
KTMGRVLMK

SEQ ID NO: 1010 - protein, 9 aa, Fusobacterium nucleatum
EGASIFYAT

SEQ ID NO: 1011 - protein, 8 aa, Fusobacterium nucleatum
YEGVTITV

SEQ ID NO: 1012 - protein, 9 aa, Fusobacterium nucleatum
VYAVNGTEI

SEQ ID NO: 1013 - protein, 9 aa, Fusobacterium nucleatum
TLTNQNSIV

SEQ ID NO: 1014 - protein, 9 aa, Fusobacterium nucleatum
KNSIGIYGF

SEQ ID NO: 1015 - protein, 9 aa, Fusobacterium nucleatum
VSFGEGASL

SEQ ID NO: 1016 - protein, 11 aa, Fusobacterium nucleatum
GRISLSNSSIS

SEQ ID NO: 1017 - protein, 9 aa, Fusobacterium nucleatum
QESAGIYAP

SEQ ID NO: 1018 - protein, 10 aa, Fusobacterium nucleatum
SGEIKVDAAY

SEQ ID NO: 1019 - protein, 11 aa, Fusobacterium nucleatum
KEFSHLRNSWS

SEQ ID NO: 1020 - protein, 9 aa, Fusobacterium nucleatum
KEASVGIYA

SEQ ID NO: 1021 - protein, 9 aa, Fusobacterium nucleatum
LGSKGSNLK

SEQ ID NO: 1022 - protein, 10 aa, Fusobacterium nucleatum
SPKEVTKQAI

SEQ ID NO: 1023 - protein, 9 aa, Fusobacterium nucleatum
WTISGDIFV

SEQ ID NO: 1024 - protein, 8 aa, Fusobacterium nucleatum
YTGIVHNR

SEQ ID NO: 1025 - protein, 8 aa, Fusobacterium nucleatum
RGNVKFDL

SEQ ID NO: 1026 - protein, 10 aa, Fusobacterium nucleatum
DSANSLEPTI

SEQ ID NO: 1027 - protein, 9 aa, Fusobacterium nucleatum
TLDSNTSKL

SEQ ID NO: 1028 - protein, 10 aa, Fusobacterium nucleatum
TIKESLIGMF

SEQ ID NO: 1029 - protein, 11 aa, Fusobacterium nucleatum
KENLKNSVGGL

SEQ ID NO: 1030 - protein, 10 aa, Fusobacterium nucleatum
KLGRGTGWYT

SEQ ID NO: 1031 - protein, 8 aa, Fusobacterium nucleatum
QTLLTQAY

SEQ ID NO: 1032 - protein, 9 aa, Fusobacterium nucleatum
SEIIVNKEA

SEQ ID NO: 1033 - protein, 11 aa, Fusobacterium nucleatum
DEIFNAKSKYY

SEQ ID NO: 1034 - protein, 9 aa, Fusobacterium nucleatum
TRIDKGIGI

SEQ ID NO: 1035 - protein, 9 aa, Fusobacterium nucleatum
SIAKRYKSV

SEQ ID NO: 1036 - protein, 8 aa, Fusobacterium nucleatum
YLSIRPEI

SEQ ID NO: 1037 - protein, 10 aa, Fusobacterium nucleatum
KVNENVTGLA

SEQ ID NO: 1038 - protein, 9 aa, Fusobacterium nucleatum
IQSYIKGIK

SEQ ID NO: 1039 - protein, 10 aa, Fusobacterium nucleatum
YGVGVYLQGA

SEQ ID NO: 1040 - protein, 10 aa, Fusobacterium nucleatum
QGNQVVKSPW

SEQ ID NO: 1041 - protein, 11 aa, Fusobacterium nucleatum
LKPRMVLTHVI

SEQ ID NO: 1042 - protein, 10 aa, Fusobacterium nucleatum
ARAKNDGTIK

SEQ ID NO: 1043 - protein, 10 aa, Fusobacterium nucleatum
NTKDININTK

SEQ ID NO: 1044 - protein, 8 aa, Fusobacterium nucleatum
EIKVDAAY

SEQ ID NO: 1045 - protein, 10 aa, Fusobacterium nucleatum
GTIDFSAAEK

SEQ ID NO: 1046 - protein, 10 aa, Fusobacterium nucleatum
DLNVGLDNQR

SEQ ID NO: 1047 - protein, 10 aa, Fusobacterium nucleatum
INLGNGSVGL

SEQ ID NO: 1048 - protein, 9 aa, Fusobacterium nucleatum
LMLGVSAFS

SEQ ID NO: 1049 - protein, 10 aa, Fusobacterium nucleatum
YAPKSNISKV

SEQ ID NO: 1050 - protein, 11 aa, Fusobacterium nucleatum
GTNGIIVSAKK

SEQ ID NO: 1051 - protein, 11 aa, Fusobacterium nucleatum
TVSNGSSAVYV

SEQ ID NO: 1052 - protein, 8 aa, Fusobacterium nucleatum
NAYGVAYV

SEQ ID NO: 1053 - protein, 9 aa, Fusobacterium nucleatum
KRYKSVKYS

SEQ ID NO: 1054 - protein, 9 aa, Fusobacterium nucleatum
VLDKEFSHL

SEQ ID NO: 1055 - protein, 10 aa, Fusobacterium nucleatum
ESGATKNVGI

SEQ ID NO: 1056 - protein, 10 aa, Fusobacterium nucleatum
VLIRGKRDSK

SEQ ID NO: 1057 - protein, 10 aa, Fusobacterium nucleatum
KYLNNNTSDK

SEQ ID NO: 1058 - protein, 9 aa, Fusobacterium nucleatum
ETSISSVSK

SEQ ID NO: 1059 - protein, 11 aa, Fusobacterium nucleatum
AYTNADWFNIR

SEQ ID NO: 1060 - protein, 10 aa, Fusobacterium nucleatum
KNNGTSDSAK

SEQ ID NO: 1061 - protein, 11 aa, Fusobacterium nucleatum
LLKGETDIQSY

SEQ ID NO: 1062 - protein, 10 aa, Fusobacterium nucleatum
VKNGKPTFLR

SEQ ID NO: 1063 - protein, 8 aa, Fusobacterium nucleatum
SYTVRNSV

SEQ ID NO: 1064 - protein, 10 aa, Fusobacterium nucleatum
NINSKESAGV

SEQ ID NO: 1065 - protein, 10 aa, Fusobacterium nucleatum
INANNKNLTM

SEQ ID NO: 1066 - protein, 11 aa, Fusobacterium nucleatum
YTYGIGIKNEI

SEQ ID NO: 1067 - protein, 10 aa, Fusobacterium nucleatum
TDTAGVIDYK

SEQ ID NO: 1068 - protein, 9 aa, Fusobacterium nucleatum
DKMSGSPSV

SEQ ID NO: 1069 - protein, 9 aa, Fusobacterium nucleatum
KSVVNNGEL

SEQ ID NO: 1070 - protein, 9 aa, Fusobacterium nucleatum
NGIIGLLLK

SEQ ID NO: 1071 - protein, 9 aa, Fusobacterium nucleatum
YTAEGASTI

SEQ ID NO: 1072 - protein, 9 aa, Fusobacterium nucleatum
LAKDTNSTA

SEQ ID NO: 1073 - protein, 11 aa, Fusobacterium nucleatum
TGVYVDDGAKF

SEQ ID NO: 1074 - protein, 10 aa, Fusobacterium nucleatum
AYIEGNSALT

SEQ ID NO: 1075 - protein, 10 aa, Fusobacterium nucleatum
YKSVKYSLGL

SEQ ID NO: 1076 - protein, 10 aa, Fusobacterium nucleatum
TEFNGGTATI

SEQ ID NO: 1077 - protein, 10 aa, Fusobacterium nucleatum
ALAGANIGKI

SEQ ID NO: 1078 - protein, 9 aa, Fusobacterium nucleatum
ITINQKKSV

SEQ ID NO: 1079 - protein, 9 aa, Fusobacterium nucleatum
TQDEESAGM

SEQ ID NO: 1080 - protein, 10 aa, Fusobacterium nucleatum
MLGKVKSAVT

SEQ ID NO: 1081 - protein, 11 aa, Fusobacterium nucleatum
NRGEIRTTDSY

SEQ ID NO: 1082 - protein, 10 aa, Fusobacterium nucleatum
MFVGYNKMHR

SEQ ID NO: 1083 - protein, 9 aa, Fusobacterium nucleatum
STAVGKENV

SEQ ID NO: 1084 - protein, 8 aa, Fusobacterium nucleatum
LGKVKSAV

SEQ ID NO: 1085 - protein, 8 aa, Fusobacterium nucleatum
TANNNRAL

SEQ ID NO: 1086 - protein, 9 aa, Fusobacterium nucleatum
LVTNNSATL

SEQ ID NO: 1087 - protein, 10 aa, Fusobacterium nucleatum
DVQGVGVYGK

SEQ ID NO: 1088 - protein, 10 aa, Fusobacterium nucleatum
TLGTNTIKLK

SEQ ID NO: 1089 - protein, 8 aa, Fusobacterium nucleatum
RTSVGVAY

SEQ ID NO: 1090 - protein, 10 aa, Fusobacterium nucleatum
GTVKNNKTIK

SEQ ID NO: 1091 - protein, 10 aa, Fusobacterium nucleatum
GTEINDQASK

SEQ ID NO: 1092 - protein, 10 aa, Fusobacterium nucleatum
KPFLDQIQGR

SEQ ID NO: 1093 - protein, 9 aa, Fusobacterium nucleatum
GMYSSSSLK

SEQ ID NO: 1094 - protein, 9 aa, Fusobacterium nucleatum
AASTSVLVA

SEQ ID NO: 1095 - protein, 9 aa, Fusobacterium nucleatum
GLVDLENLR

SEQ ID NO: 1096 - protein, 11 aa, Fusobacterium nucleatum
KRATGINEKNI

SEQ ID NO: 1097 - protein, 9 aa, Fusobacterium nucleatum
RTDKGIGIY

SEQ ID NO: 1098 - protein, 9 aa, Fusobacterium nucleatum
RKGNVKFDL

SEQ ID NO: 1099 - protein, 9 aa, Fusobacterium nucleatum
MAGKATTVT

SEQ ID NO: 1100 - protein, 10 aa, Fusobacterium nucleatum
AESIGIYSNA

SEQ ID NO: 1101 - protein, 9 aa, Fusobacterium nucleatum
AMYAENTNL

SEQ ID NO: 1102 - protein, 10 aa, Fusobacterium nucleatum
NIGKITGYGV

SEQ ID NO: 1103 - protein, 10 aa, Fusobacterium nucleatum
LYSNGKANII

SEQ ID NO: 1104 - protein, 9 aa, Fusobacterium nucleatum
NGSVGLYSK

SEQ ID NO: 1105 - protein, 9 aa, Fusobacterium nucleatum
NGNSAEEVR

SEQ ID NO: 1106 - protein, 9 aa, Fusobacterium nucleatum
NAWNFTDGL

SEQ ID NO: 1107 - protein, 10 aa, Fusobacterium nucleatum
LGRVANGKNK

SEQ ID NO: 1108 - protein, 9 aa, Fusobacterium nucleatum
VAQKASAGI

SEQ ID NO: 1109 - protein, 10 aa, Fusobacterium nucleatum
NLGNGSVGLY

SEQ ID NO: 1110 - protein, 10 aa, Fusobacterium nucleatum
NISTALNNAR

SEQ ID NO: 1111 - protein, 9 aa, Fusobacterium nucleatum
ETITGTKDK

SEQ ID NO: 1112 - protein, 8 aa, Fusobacterium nucleatum
MYATNANV

SEQ ID NO: 1113 - protein, 10 aa, Fusobacterium nucleatum
SVEKRIFNKL

SEQ ID NO: 1114 - protein, 10 aa, Fusobacterium nucleatum
TVTNSPLLSK

SEQ ID NO: 1115 - protein, 8 aa, Fusobacterium nucleatum
SEEGRVYI

SEQ ID NO: 1116 - protein, 10 aa, Fusobacterium nucleatum
GNGIIGLLLK

SEQ ID NO: 1117 - protein, 9 aa, Fusobacterium nucleatum
ALNNARIVA

SEQ ID NO: 1118 - protein, 8 aa, Fusobacterium nucleatum
NQNRVAYY

SEQ ID NO: 1119 - protein, 9 aa, Fusobacterium nucleatum
VTLGTNTIK

SEQ ID NO: 1120 - protein, 8 aa, Fusobacterium nucleatum
SANNSNHL

SEQ ID NO: 1121 - protein, 9 aa, Fusobacterium nucleatum
KVADTASAK

SEQ ID NO: 1122 - protein, 10 aa, Fusobacterium nucleatum
IFVGYNKMHR

SEQ ID NO: 1123 - protein, 10 aa, Fusobacterium nucleatum
YTGIVHNTFK

SEQ ID NO: 1124 - protein, 11 aa, Fusobacterium nucleatum
KLTSIAGSLTW

SEQ ID NO: 1125 - protein, 11 aa, Fusobacterium nucleatum
ISSDPEGQALR

SEQ ID NO: 1126 - protein, 9 aa, Fusobacterium nucleatum
IVYGIGMAA

SEQ ID NO: 1127 - protein, 9 aa, Fusobacterium nucleatum
KDKYAIGIY

SEQ ID NO: 1128 - protein, 10 aa, Fusobacterium nucleatum
SRNTTMSHMI

SEQ ID NO: 1129 - protein, 11 aa, Fusobacterium nucleatum
MAKLPYTSFVK

SEQ ID NO: 1130 - protein, 10 aa, Fusobacterium nucleatum
VVGISLNNSK

SEQ ID NO: 1131 - protein, 9 aa, Fusobacterium nucleatum
YTRGNWKVR

SEQ ID NO: 1132 - protein, 10 aa, Fusobacterium nucleatum
ETITGTKDKA

SEQ ID NO: 1133 - protein, 10 aa, Fusobacterium nucleatum
ENTSTGTITL

SEQ ID NO: 1134 - protein, 9 aa, Fusobacterium nucleatum
KSVKYSLGL

SEQ ID NO: 1135 - protein, 11 aa, Fusobacterium nucleatum
SLGMLAQNNGK

SEQ ID NO: 1136 - protein, 10 aa, Fusobacterium nucleatum
SVFLYSNGKA

SEQ ID NO: 1137 - protein, 9 aa, Fusobacterium nucleatum
TVKNNKTIK

SEQ ID NO: 1138 - protein, 10 aa, Fusobacterium nucleatum
TLTGVKTIKL

SEQ ID NO: 1139 - protein, 11 aa, Fusobacterium nucleatum
IHVKDQGVGIY

SEQ ID NO: 1140 - protein, 9 aa, Fusobacterium nucleatum
YVNGKDSAL

SEQ ID NO: 1141 - protein, 8 aa, Fusobacterium nucleatum
KDYEGVTI

SEQ ID NO: 1142 - protein, 11 aa, Fusobacterium nucleatum
IAFYIKNGGDF

SEQ ID NO: 1143 - protein, 9 aa, Fusobacterium nucleatum
TGNIEVAQK

SEQ ID NO: 1144 - protein, 10 aa, Fusobacterium nucleatum
IDSNGSSAVY

SEQ ID NO: 1145 - protein, 9 aa, Fusobacterium nucleatum
IQGVGVYAK

SEQ ID NO: 1146 - protein, 10 aa, Fusobacterium nucleatum
AYRHYFGTKT

SEQ ID NO: 1147 - protein, 9 aa, Fusobacterium nucleatum
NVRGGVGLR

SEQ ID NO: 1148 - protein, 10 aa, Fusobacterium nucleatum
VTALTNRDYI

SEQ ID NO: 1149 - protein, 11 aa, Fusobacterium nucleatum
KEEMSAGMYVK

SEQ ID NO: 1150 - protein, 11 aa, Fusobacterium nucleatum
TAKDSEPTAVY

SEQ ID NO: 1151 - protein, 9 aa, Fusobacterium nucleatum
TFLRNGVPI

SEQ ID NO: 1152 - protein, 11 aa, Fusobacterium nucleatum
NSIDSNGSSAV

SEQ ID NO: 1153 - protein, 10 aa, Fusobacterium nucleatum
NSNHLIAFYI

SEQ ID NO: 1154 - protein, 9 aa, Fusobacterium nucleatum
LGQDSTGLF

SEQ ID NO: 1155 - protein, 10 aa, Fusobacterium nucleatum
GIYTRGNWKV

SEQ ID NO: 1156 - protein, 10 aa, Fusobacterium nucleatum
KTETATPTVA

SEQ ID NO: 1157 - protein, 11 aa, Fusobacterium nucleatum
SANSFEPAIGI

SEQ ID NO: 1158 - protein, 11 aa, Fusobacterium nucleatum
KVHINGNKNLK

SEQ ID NO: 1159 - protein, 10 aa, Fusobacterium nucleatum
SAGVLAEKYK

SEQ ID NO: 1160 - protein, 11 aa, Fusobacterium nucleatum
GRGDKPQKYLF

SEQ ID NO: 1161 - protein, 11 aa, Fusobacterium nucleatum
LQAKVGLFKSV

SEQ ID NO: 1162 - protein, 10 aa, Fusobacterium nucleatum
IKPEVGTELA

SEQ ID NO: 1163 - protein, 9 aa, Fusobacterium nucleatum
KVTLGSNTI

SEQ ID NO: 1164 - protein, 11 aa, Fusobacterium nucleatum
NSYGVIIRGKR

SEQ ID NO: 1165 - protein, 10 aa, Fusobacterium nucleatum
HNVRGGVGLR

SEQ ID NO: 1166 - protein, 9 aa, Fusobacterium nucleatum
TFGLLNGNK

SEQ ID NO: 1167 - protein, 10 aa, Fusobacterium nucleatum
TNKGRVYVGK

SEQ ID NO: 1168 - protein, 10 aa, Fusobacterium nucleatum
TIWQEGNFEA

SEQ ID NO: 1169 - protein, 10 aa, Fusobacterium nucleatum
GVTITVKNGK

SEQ ID NO: 1170 - protein, 8 aa, Fusobacterium nucleatum
LYSKGQSY

SEQ ID NO: 1171 - protein, 8 aa, Fusobacterium nucleatum
KTITANGK

SEQ ID NO: 1172 - protein, 11 aa, Fusobacterium nucleatum
VVDEIFHAKSK

SEQ ID NO: 1173 - protein, 10 aa, Fusobacterium nucleatum
TVSLGNDSVF

SEQ ID NO: 1174 - protein, 9 aa, Fusobacterium nucleatum
NISTALNNA

SEQ ID NO: 1175 - protein, 10 aa, Fusobacterium nucleatum
GMYATNANVT

SEQ ID NO: 1176 - protein, 10 aa, Fusobacterium nucleatum
NGENSGTITM

SEQ ID NO: 1177 - protein, 10 aa, Fusobacterium nucleatum
GASLFYATLK

SEQ ID NO: 1178 - protein, 11 aa, Fusobacterium nucleatum
SKINSSSIANK

SEQ ID NO: 1179 - protein, 11 aa, Fusobacterium nucleatum
TGNGIIGLLLK

SEQ ID NO: 1180 - protein, 10 aa, Fusobacterium nucleatum
KTMGRVLMKA

SEQ ID NO: 1181 - protein, 10 aa, Fusobacterium nucleatum
TAPSAPSAPT

SEQ ID NO: 1182 - protein, 10 aa, Fusobacterium nucleatum
ATIELVGSNI

SEQ ID NO: 1183 - protein, 11 aa, Fusobacterium nucleatum
ISSSTNGNRNW

SEQ ID NO: 1184 - protein, 11 aa, Fusobacterium nucleatum
IRIYNNKSIGM

SEQ ID NO: 1185 - protein, 9 aa, Fusobacterium nucleatum
ARAKNDGTI

SEQ ID NO: 1186 - protein, 10 aa, Fusobacterium nucleatum
TITMQNKNAV

SEQ ID NO: 1187 - protein, 10 aa, Fusobacterium nucleatum
GKATNKGRVY

SEQ ID NO: 1188 - protein, 9 aa, Fusobacterium nucleatum
VKDQGIGIY

SEQ ID NO: 1189 - protein, 8 aa, Fusobacterium nucleatum
WKDVSQAY

SEQ ID NO: 1190 - protein, 10 aa, Fusobacterium nucleatum
AKGSANFSNK

SEQ ID NO: 1191 - protein, 11 aa, Fusobacterium nucleatum
SGDGIIGLLLK

SEQ ID NO: 1192 - protein, 11 aa, Fusobacterium nucleatum
GGKVADTASAK

SEQ ID NO: 1193 - protein, 10 aa, Fusobacterium nucleatum
ATATNKIQSM

SEQ ID NO: 1194 - protein, 9 aa, Fusobacterium nucleatum
RLENEKALK

SEQ ID NO: 1195 - protein, 10 aa, Fusobacterium nucleatum
ESIGMLGQNA

SEQ ID NO: 1196 - protein, 9 aa, Fusobacterium nucleatum
GMAGKATTV

SEQ ID NO: 1197 - protein, 9 aa, Fusobacterium nucleatum
KATNKGTII

SEQ ID NO: 1198 - protein, 9 aa, Fusobacterium nucleatum
ENEDIKLGR

SEQ ID NO: 1199 - protein, 9 aa, Fusobacterium nucleatum
GSRATATNK

SEQ ID NO: 1200 - protein, 10 aa, Fusobacterium nucleatum
ESAGIYAPKS

SEQ ID NO: 1201 - protein, 9 aa, Fusobacterium nucleatum
LGKVKSAVT

SEQ ID NO: 1202 - protein, 9 aa, Fusobacterium nucleatum
YVHENEDIK

SEQ ID NO: 1203 - protein, 9 aa, Fusobacterium nucleatum
EIINSGIIK

SEQ ID NO: 1204 - protein, 10 aa, Fusobacterium nucleatum
GVAVMNGSTL

SEQ ID NO: 1205 - protein, 11 aa, Fusobacterium nucleatum
GKIYIDADNSY

SEQ ID NO: 1206 - protein, 10 aa, Fusobacterium nucleatum
GAYIEGNSIL

SEQ ID NO: 1207 - protein, 10 aa, Fusobacterium nucleatum
YVENSSATNK

SEQ ID NO: 1208 - protein, 9 aa, Fusobacterium nucleatum
TAGVIDYKY

SEQ ID NO: 1209 - protein, 10 aa, Fusobacterium nucleatum
YLSIKPEVGT

SEQ ID NO: 1210 - protein, 9 aa, Fusobacterium nucleatum
MFINSARAK

SEQ ID NO: 1211 - protein, 10 aa, Fusobacterium nucleatum
KAILDEDYKV

SEQ ID NO: 1212 - protein, 10 aa, Fusobacterium nucleatum
YAVNGQDTKV

SEQ ID NO: 1213 - protein, 9 aa, Fusobacterium nucleatum
VGKNSIGIY

SEQ ID NO: 1214 - protein, 10 aa, Fusobacterium nucleatum
DEIFNAKSKY

SEQ ID NO: 1215 - protein, 9 aa, Fusobacterium nucleatum
NIGILANKR

SEQ ID NO: 1216 - protein, 9 aa, Fusobacterium nucleatum
VKMSAENSI

SEQ ID NO: 1217 - protein, 11 aa, Fusobacterium nucleatum
TSFVNKTDNAW

SEQ ID NO: 1218 - protein, 11 aa, Fusobacterium nucleatum
STLENHGKIYI

SEQ ID NO: 1219 - protein, 11 aa, Fusobacterium nucleatum
IAFYIKNGGNF

SEQ ID NO: 1220 - protein, 9 aa, Fusobacterium nucleatum
ILIDADNSY

SEQ ID NO: 1221 - protein, 9 aa, Fusobacterium nucleatum
ISGDIFVGY

SEQ ID NO: 1222 - protein, 9 aa, Fusobacterium nucleatum
TALNNARIV

SEQ ID NO: 1223 - protein, 10 aa, Fusobacterium nucleatum
IVLDKEFSHL

SEQ ID NO: 1224 - protein, 9 aa, Fusobacterium nucleatum
ATLDKNTSK

SEQ ID NO: 1225 - protein, 10 aa, Fusobacterium nucleatum
KGSTVNIDHW

SEQ ID NO: 1226 - protein, 10 aa, Fusobacterium nucleatum
NSSSIANKTV

SEQ ID NO: 1227 - protein, 9 aa, Fusobacterium nucleatum
FYATLKAKA

SEQ ID NO: 1228 - protein, 10 aa, Fusobacterium nucleatum
YLQGTSGDKA

SEQ ID NO: 1229 - protein, 8 aa, Fusobacterium nucleatum
FLRNGVPI

SEQ ID NO: 1230 - protein, 11 aa, Fusobacterium nucleatum
LTTDSKITVGK

SEQ ID NO: 1231 - protein, 11 aa, Fusobacterium nucleatum
RLSEGFSIRPY

SEQ ID NO: 1232 - protein, 10 aa, Fusobacterium nucleatum
QITSESGATK

SEQ ID NO: 1233 - protein, 10 aa, Fusobacterium nucleatum
SLNWTISGDM

SEQ ID NO: 1234 - protein, 10 aa, Fusobacterium nucleatum
IPTTVNVTAL

SEQ ID NO: 1235 - protein, 11 aa, Fusobacterium nucleatum
QSSHEDLRSER

SEQ ID NO: 1236 - protein, 10 aa, Fusobacterium nucleatum
ATQNTMLYLK

SEQ ID NO: 1237 - protein, 8 aa, Fusobacterium nucleatum
SEVTNSGL

SEQ ID NO: 1238 - protein, 9 aa, Fusobacterium nucleatum
FADGLEQRY

SEQ ID NO: 1239 - protein, 11 aa, Fusobacterium nucleatum
YTGIVHNRFKF

SEQ ID NO: 1240 - protein, 9 aa, Fusobacterium nucleatum
KVGKNSIGI

SEQ ID NO: 1241 - protein, 11 aa, Fusobacterium nucleatum
ASLFYATLKAK

SEQ ID NO: 1242 - protein, 11 aa, Fusobacterium nucleatum
TNESAVINSGR

SEQ ID NO: 1243 - protein, 9 aa, Fusobacterium nucleatum
SAENSIGIM

SEQ ID NO: 1244 - protein, 11 aa, Fusobacterium nucleatum
IKVDAAYSTGM

SEQ ID NO: 1245 - protein, 9 aa, Fusobacterium nucleatum
TEQMKAVPT

SEQ ID NO: 1246 - protein, 11 aa, Fusobacterium nucleatum
LTPGNDSLNSW

SEQ ID NO: 1247 - protein, 11 aa, Fusobacterium nucleatum
SLFYATLKAKA

SEQ ID NO: 1248 - protein, 10 aa, Fusobacterium nucleatum
SAGVYVKLDK

SEQ ID NO: 1249 - protein, 10 aa, Fusobacterium nucleatum
NVLAENTGTI

SEQ ID NO: 1250 - protein, 10 aa, Fusobacterium nucleatum
YVHENEDIKL

SEQ ID NO: 1251 - protein, 10 aa, Fusobacterium nucleatum
FGEGASLFYA

SEQ ID NO: 1252 - protein, 11 aa, Fusobacterium nucleatum
GMAADNGGYIK

SEQ ID NO: 1253 - protein, 11 aa, Fusobacterium nucleatum
YLENSKFVSHL

SEQ ID NO: 1254 - protein, 9 aa, Fusobacterium nucleatum
QWFVKGDVI

SEQ ID NO: 1255 - protein, 9 aa, Fusobacterium nucleatum
KTLRTSLEV

SEQ ID NO: 1256 - protein, 11 aa, Fusobacterium nucleatum
VGTELAYRHYF

SEQ ID NO: 1257 - protein, 10 aa, Fusobacterium nucleatum
KMSGSPSVAM

SEQ ID NO: 1258 - protein, 8 aa, Fusobacterium nucleatum
WQFGMNYF

SEQ ID NO: 1259 - protein, 9 aa, Fusobacterium nucleatum
SANNSNHLI

SEQ ID NO: 1260 - protein, 11 aa, Fusobacterium nucleatum
VEEAVGVFAGV

SEQ ID NO: 1261 - protein, 11 aa, Fusobacterium nucleatum
ATDDIDPMTGK

SEQ ID NO: 1262 - protein, 10 aa, Fusobacterium nucleatum
GEIRTTDSYA

SEQ ID NO: 1263 - protein, 11 aa, Fusobacterium nucleatum
TVKEESSVGIY

SEQ ID NO: 1264 - protein, 10 aa, Fusobacterium nucleatum
YSNANNTKSV

SEQ ID NO: 1265 - protein, 10 aa, Fusobacterium nucleatum
NLTMTTATNI

SEQ ID NO: 1266 - protein, 9 aa, Fusobacterium nucleatum
EIFNAKSKY

SEQ ID NO: 1267 - protein, 10 aa, Fusobacterium nucleatum
NGTIDFSTGK

SEQ ID NO: 1268 - protein, 8 aa, Fusobacterium nucleatum
KSIGMYGK

SEQ ID NO: 1269 - protein, 10 aa, Fusobacterium nucleatum
NLTTDSKITV

SEQ ID NO: 1270 - protein, 10 aa, Fusobacterium nucleatum
SKSSVGMLAK

SEQ ID NO: 1271 - protein, 10 aa, Fusobacterium nucleatum
TNKGTVTTEK

SEQ ID NO: 1272 - protein, 10 aa, Fusobacterium nucleatum
MGNNLCKVEK

SEQ ID NO: 1273 - protein, 11 aa, Fusobacterium nucleatum
IYIDADNSYGV

SEQ ID NO: 1274 - protein, 11 aa, Fusobacterium nucleatum
STVSNGSSAVY

SEQ ID NO: 1275 - protein, 9 aa, Fusobacterium nucleatum
NFADGLEQR

SEQ ID NO: 1276 - protein, 10 aa, Fusobacterium nucleatum
IDIDGATPPI

SEQ ID NO: 1277 - protein, 11 aa, Fusobacterium nucleatum
VADTASAKINL

SEQ ID NO: 1278 - protein, 11 aa, Fusobacterium nucleatum
AEGIKNHSMTW

SEQ ID NO: 1279 - protein, 9 aa, Fusobacterium nucleatum
IVSSKENLK

SEQ ID NO: 1280 - protein, 10 aa, Fusobacterium nucleatum
GSAAMLGEVK

SEQ ID NO: 1281 - protein, 9 aa, Fusobacterium nucleatum
GMYLINAEK

SEQ ID NO: 1282 - protein, 8 aa, Fusobacterium nucleatum
GTWGISWK

SEQ ID NO: 1283 - protein, 9 aa, Fusobacterium nucleatum
NAVGILGSK

SEQ ID NO: 1284 - protein, 9 aa, Fusobacterium nucleatum
VEEAVGVFA

SEQ ID NO: 1285 - protein, 11 aa, Fusobacterium nucleatum
KIKTFGMKGEY

SEQ ID NO: 1286 - protein, 10 aa, Fusobacterium nucleatum
NKNLKPKMVL

SEQ ID NO: 1287 - protein, 8 aa, Fusobacterium nucleatum
GEGASIFY

SEQ ID NO: 1288 - protein, 10 aa, Fusobacterium nucleatum
SNVRGGVGLR

SEQ ID NO: 1289 - protein, 9 aa, Fusobacterium nucleatum
WYTGIVHNR

SEQ ID NO: 1290 - protein, 10 aa, Fusobacterium nucleatum
TSGTIDVGQK

SEQ ID NO: 1291 - protein, 11 aa, Fusobacterium nucleatum
YSSSSLKATNK

SEQ ID NO: 1292 - protein, 10 aa, Fusobacterium nucleatum
GWYTGIVHNR

SEQ ID NO: 1293 - protein, 9 aa, Fusobacterium nucleatum
GRVSKIREK

SEQ ID NO: 1294 - protein, 10 aa, Fusobacterium nucleatum
TIAGKKTLGV

SEQ ID NO: 1295 - protein, 8 aa, Fusobacterium nucleatum
VYAPKANI

SEQ ID NO: 1296 - protein, 10 aa, Fusobacterium nucleatum
DSEPTGVYAV

SEQ ID NO: 1297 - protein, 9 aa, Fusobacterium nucleatum
ADNSYGVLI

SEQ ID NO: 1298 - protein, 11 aa, Fusobacterium nucleatum
IEVGEKSIGIY

SEQ ID NO: 1299 - protein, 9 aa, Fusobacterium nucleatum
GEKAVGLYS

SEQ ID NO: 1300 - protein, 11 aa, Fusobacterium nucleatum
RHYFGIKTLRT

SEQ ID NO: 1301 - protein, 8 aa, Fusobacterium nucleatum
EEESVGMY

SEQ ID NO: 1302 - protein, 9 aa, Fusobacterium nucleatum
KGIFIKDEK

SEQ ID NO: 1303 - protein, 11 aa, Fusobacterium nucleatum
ETITGTKDKAR

SEQ ID NO: 1304 - protein, 9 aa, Fusobacterium nucleatum
AVNHGTIDF

SEQ ID NO: 1305 - protein, 9 aa, Fusobacterium nucleatum
TKNVGIYAV

SEQ ID NO: 1306 - protein, 9 aa, Fusobacterium nucleatum
RLSEDFSIR

SEQ ID NO: 1307 - protein, 11 aa, Fusobacterium nucleatum
GWYTGIVHNRF

SEQ ID NO: 1308 - protein, 9 aa, Fusobacterium nucleatum
APIELANSS

SEQ ID NO: 1309 - protein, 11 aa, Fusobacterium nucleatum
KYLFNGIYTRG

SEQ ID NO: 1310 - protein, 9 aa, Fusobacterium nucleatum
KDQGIGIYK

SEQ ID NO: 1311 - protein, 10 aa, Fusobacterium nucleatum
VVNESTAVGK

SEQ ID NO: 1312 - protein, 10 aa, Fusobacterium nucleatum
AGDSSTVTNK

SEQ ID NO: 1313 - protein, 9 aa, Fusobacterium nucleatum
LAYKHYFGT

SEQ ID NO: 1314 - protein, 11 aa, Fusobacterium nucleatum
NKGTISLDGSR

SEQ ID NO: 1315 - protein, 10 aa, Fusobacterium nucleatum
VTLGSNTIKL

SEQ ID NO: 1316 - protein, 9 aa, Fusobacterium nucleatum
VRGKGTWGI

SEQ ID NO: 1317 - protein, 11 aa, Fusobacterium nucleatum
TKEEMSAGMYV

SEQ ID NO: 1318 - protein, 11 aa, Fusobacterium nucleatum
SVKYSLGLAIL

SEQ ID NO: 1319 - protein, 8 aa, Fusobacterium nucleatum
IADSANSL

SEQ ID NO: 1320 - protein, 10 aa, Fusobacterium nucleatum
YAKKGSTVNI

SEQ ID NO: 1321 - protein, 11 aa, Fusobacterium nucleatum
TFKFKDIGNSK

SEQ ID NO: 1322 - protein, 11 aa, Fusobacterium nucleatum
AMAKLPYTSFV

SEQ ID NO: 1323 - protein, 10 aa, Fusobacterium nucleatum
SAAEKSTAMF

SEQ ID NO: 1324 - protein, 9 aa, Fusobacterium nucleatum
STLENHGKI

SEQ ID NO: 1325 - protein, 11 aa, Fusobacterium nucleatum
GTSKTGSAGIY

SEQ ID NO: 1326 - protein, 9 aa, Fusobacterium nucleatum
EEAVGVFAG

SEQ ID NO: 1327 - protein, 9 aa, Fusobacterium nucleatum
KTASVKNTK

SEQ ID NO: 1328 - protein, 10 aa, Fusobacterium nucleatum
GMLAQNNGKV

SEQ ID NO: 1329 - protein, 10 aa, Fusobacterium nucleatum
STGMYLTNAE

SEQ ID NO: 1330 - protein, 10 aa, Fusobacterium nucleatum
TVAATSPSDK

SEQ ID NO: 1331 - protein, 11 aa, Fusobacterium nucleatum
IVSFGEGASLF

SEQ ID NO: 1332 - protein, 9 aa, Fusobacterium nucleatum
NTDVNKTNI

SEQ ID NO: 1333 - protein, 10 aa, Fusobacterium nucleatum
EKNIGILADK

SEQ ID NO: 1334 - protein, 10 aa, Fusobacterium nucleatum
TGKIYLDGSR

SEQ ID NO: 1335 - protein, 9 aa, Fusobacterium nucleatum
DVSKIVYGI

SEQ ID NO: 1336 - protein, 10 aa, Fusobacterium nucleatum
KTSAGILAEI

SEQ ID NO: 1337 - protein, 8 aa, Fusobacterium nucleatum
KTLGVFLK

SEQ ID NO: 1338 - protein, 9 aa, Fusobacterium nucleatum
KAESGIGML

SEQ ID NO: 1339 - protein, 10 aa, Fusobacterium nucleatum
VGENTSTGTI

SEQ ID NO: 1340 - protein, 9 aa, Fusobacterium nucleatum
GILGVNSNF

SEQ ID NO: 1341 - protein, 10 aa, Fusobacterium nucleatum
LETNTNAGLI

SEQ ID NO: 1342 - protein, 8 aa, Fusobacterium nucleatum
FLMLGVGA

SEQ ID NO: 1343 - protein, 9 aa, Fusobacterium nucleatum
IENKGGQIT

SEQ ID NO: 1344 - protein, 10 aa, Fusobacterium nucleatum
VEQIGKLIGK

SEQ ID NO: 1345 - protein, 9 aa, Fusobacterium nucleatum
ASAKINLGK

SEQ ID NO: 1346 - protein, 9 aa, Fusobacterium nucleatum
LAYRHYFGT

SEQ ID NO: 1347 - protein, 9 aa, Fusobacterium nucleatum
LEVKHNDYL

SEQ ID NO: 1348 - protein, 9 aa, Fusobacterium nucleatum
VEILARISP

SEQ ID NO: 1349 - protein, 9 aa, Fusobacterium nucleatum
APSSAGIQL

SEQ ID NO: 1350 - protein, 9 aa, Fusobacterium nucleatum
ITLNAPSSA

SEQ ID NO: 1351 - protein, 10 aa, Fusobacterium nucleatum
AATSPSDKAK

SEQ ID NO: 1352 - protein, 9 aa, Fusobacterium nucleatum
VTAESGVGI

SEQ ID NO: 1353 - protein, 9 aa, Fusobacterium nucleatum
NVEIASGKK

SEQ ID NO: 1354 - protein, 9 aa, Fusobacterium nucleatum
RISLSNSSI

SEQ ID NO: 1355 - protein, 11 aa, Fusobacterium nucleatum
YSNGKAIINNK

SEQ ID NO: 1356 - protein, 9 aa, Fusobacterium nucleatum
FLKGSQSFE

SEQ ID NO: 1357 - protein, 9 aa, Fusobacterium nucleatum
NLREPTNEV

SEQ ID NO: 1358 - protein, 11 aa, Fusobacterium nucleatum
TDTAGVIDYKY

SEQ ID NO: 1359 - protein, 8 aa, Fusobacterium nucleatum
MEQGDQVV

SEQ ID NO: 1360 - protein, 10 aa, Fusobacterium nucleatum
STVSNGSSAV

SEQ ID NO: 1361 - protein, 10 aa, Fusobacterium nucleatum
ATATDKIQSM

SEQ ID NO: 1362 - protein, 9 aa, Fusobacterium nucleatum
GEVRLEVKH

SEQ ID NO: 1363 - protein, 10 aa, Fusobacterium nucleatum
VYLQGTSGDK

SEQ ID NO: 1364 - protein, 9 aa, Fusobacterium nucleatum
VEIASGKKL

SEQ ID NO: 1365 - protein, 8 aa, Fusobacterium nucleatum
LENHGKIY

SEQ ID NO: 1366 - protein, 9 aa, Fusobacterium nucleatum
GLFLKDANF

SEQ ID NO: 1367 - protein, 9 aa, Fusobacterium nucleatum
NTNLTTNSK

SEQ ID NO: 1368 - protein, 11 aa, Fusobacterium nucleatum
GLVKMSAENSI

SEQ ID NO: 1369 - protein, 10 aa, Fusobacterium nucleatum
ALGNGSVGLY

SEQ ID NO: 1370 - protein, 9 aa, Fusobacterium nucleatum
NLGNGSVGL

SEQ ID NO: 1371 - protein, 10 aa, Fusobacterium nucleatum
SGDMFVGYNK

SEQ ID NO: 1372 - protein, 10 aa, Fusobacterium nucleatum
YSKTPSNVEI

SEQ ID NO: 1373 - protein, 11 aa, Fusobacterium nucleatum
ITGVAMAKLPY

SEQ ID NO: 1374 - protein, 9 aa, Fusobacterium nucleatum
AENIGTINL

SEQ ID NO: 1375 - protein, 8 aa, Fusobacterium nucleatum
SAGVYAPK

SEQ ID NO: 1376 - protein, 11 aa, Fusobacterium nucleatum
HRKFLVVDEIF

SEQ ID NO: 1377 - protein, 11 aa, Fusobacterium nucleatum
ETSAGMLGKVK

SEQ ID NO: 1378 - protein, 10 aa, Fusobacterium nucleatum
ASLFYATSKA

SEQ ID NO: 1379 - protein, 11 aa, Fusobacterium nucleatum
WTISGDIFVGY

SEQ ID NO: 1380 - protein, 10 aa, Fusobacterium nucleatum
AENSIGFYGK

SEQ ID NO: 1381 - protein, 10 aa, Fusobacterium nucleatum
HVINGETSIV

SEQ ID NO: 1382 - protein, 10 aa, Fusobacterium nucleatum
SGDIFIGHNK

SEQ ID NO: 1383 - protein, 10 aa, Fusobacterium nucleatum
ILANKRATGI

SEQ ID NO: 1384 - protein, 11 aa, Fusobacterium nucleatum
SSTLLNETTGK

SEQ ID NO: 1385 - protein, 11 aa, Fusobacterium nucleatum
GMLGEDSGTVK

SEQ ID NO: 1386 - protein, 9 aa, Fusobacterium nucleatum
ASRNTTMSH

SEQ ID NO: 1387 - protein, 9 aa, Fusobacterium nucleatum
SLGNDSVFL

SEQ ID NO: 1388 - protein, 11 aa, Fusobacterium nucleatum
GSFGIVTVFNK

SEQ ID NO: 1389 - protein, 10 aa, Fusobacterium nucleatum
LPYTSFVKKT

SEQ ID NO: 1390 - protein, 10 aa, Fusobacterium nucleatum
QWFVKGDVIK

SEQ ID NO: 1391 - protein, 10 aa, Fusobacterium nucleatum
NNKSIGMYGK

SEQ ID NO: 1392 - protein, 10 aa, Fusobacterium nucleatum
ISSDPEGQEL

SEQ ID NO: 1393 - protein, 9 aa, Fusobacterium nucleatum
IIGTEYSEK

SEQ ID NO: 1394 - protein, 9 aa, Fusobacterium nucleatum
LPYTSFVNK

SEQ ID NO: 1395 - protein, 10 aa, Fusobacterium nucleatum
KNAVGILGSK

SEQ ID NO: 1396 - protein, 11 aa, Fusobacterium nucleatum
LPGGEIGRSAL

SEQ ID NO: 1397 - protein, 9 aa, Fusobacterium nucleatum
DIDPMTGKV

SEQ ID NO: 1398 - protein, 9 aa, Fusobacterium nucleatum
KGRILVGAT

SEQ ID NO: 1399 - protein, 8 aa, Fusobacterium nucleatum
HESLIGMF

SEQ ID NO: 1400 - protein, 10 aa, Fusobacterium nucleatum
FILNNTDVNK

SEQ ID NO: 1401 - protein, 10 aa, Fusobacterium nucleatum
KLTIENTGNI

SEQ ID NO: 1402 - protein, 11 aa, Fusobacterium nucleatum
LEVAYENELGR

SEQ ID NO: 1403 - protein, 10 aa, Fusobacterium nucleatum
FYATLKAKAI

SEQ ID NO: 1404 - protein, 10 aa, Fusobacterium nucleatum
FSNKGVLAYL

SEQ ID NO: 1405 - protein, 10 aa, Fusobacterium nucleatum
DVIKPFLDQI

SEQ ID NO: 1406 - protein, 8 aa, Fusobacterium nucleatum
MSDIGFYV

SEQ ID NO: 1407 - protein, 8 aa, Fusobacterium nucleatum
AEKGVGIF

SEQ ID NO: 1408 - protein, 9 aa, Fusobacterium nucleatum
GEKGIGMLS

SEQ ID NO: 1409 - protein, 10 aa, Fusobacterium nucleatum
AVIKNYGEIK

SEQ ID NO: 1410 - protein, 10 aa, Fusobacterium nucleatum
QDTKVSANNK

SEQ ID NO: 1411 - protein, 11 aa, Fusobacterium nucleatum
IESGKTLDVEL

SEQ ID NO: 1412 - protein, 11 aa, Fusobacterium nucleatum
TPYNITTPITA

SEQ ID NO: 1413 - protein, 9 aa, Fusobacterium nucleatum
KVNENVTGL

SEQ ID NO: 1414 - protein, 9 aa, Fusobacterium nucleatum
ILDKEFTHL

SEQ ID NO: 1415 - protein, 9 aa, Fusobacterium nucleatum
DLNSGATNK

SEQ ID NO: 1416 - protein, 11 aa, Fusobacterium nucleatum
NNGTIDFSTGK

SEQ ID NO: 1417 - protein, 9 aa, Fusobacterium nucleatum
KVKTFGMKG

SEQ ID NO: 1418 - protein, 9 aa, Fusobacterium nucleatum
NTNVGLVAT

SEQ ID NO: 1419 - protein, 8 aa, Fusobacterium nucleatum
KTDDIDPM

SEQ ID NO: 1420 - protein, 10 aa, Fusobacterium nucleatum
KTISVTAEKG

SEQ ID NO: 1421 - protein, 8 aa, Fusobacterium nucleatum
VEKDLRSI

SEQ ID NO: 1422 - protein, 9 aa, Fusobacterium nucleatum
ATLKAKAIL

SEQ ID NO: 1423 - protein, 9 aa, Fusobacterium nucleatum
KEFRLSEGF

SEQ ID NO: 1424 - protein, 10 aa, Fusobacterium nucleatum
VANDGANVEI

SEQ ID NO: 1425 - protein, 9 aa, Fusobacterium nucleatum
TKQAISLNI

SEQ ID NO: 1426 - protein, 11 aa, Fusobacterium nucleatum
TAMFINSARGK

SEQ ID NO: 1427 - protein, 9 aa, Fusobacterium nucleatum
EGNSALTGV

SEQ ID NO: 1428 - protein, 11 aa, Fusobacterium nucleatum
VLAYLENSKFV

SEQ ID NO: 1429 - protein, 10 aa, Fusobacterium nucleatum
VNSNFTNNSK

SEQ ID NO: 1430 - protein, 9 aa, Fusobacterium nucleatum
RISPKEVTK

SEQ ID NO: 1431 - protein, 11 aa, Fusobacterium nucleatum
AMFINSARAKN

SEQ ID NO: 1432 - protein, 10 aa, Fusobacterium nucleatum
DTAGVIDYKY

SEQ ID NO: 1433 - protein, 9 aa, Fusobacterium nucleatum
GTIDFSAAE

SEQ ID NO: 1434 - protein, 11 aa, Fusobacterium nucleatum
RIFNKLNGIGK

SEQ ID NO: 1435 - protein, 8 aa, Fusobacterium nucleatum
NVGIDNQR

SEQ ID NO: 1436 - protein, 10 aa, Fusobacterium nucleatum
SVTAEKGVGI

SEQ ID NO: 1437 - protein, 10 aa, Fusobacterium nucleatum
GLRLELIQLM

SEQ ID NO: 1438 - protein, 10 aa, Fusobacterium nucleatum
YATSKAKAIL

SEQ ID NO: 1439 - protein, 9 aa, Fusobacterium nucleatum
YGVLIRGKR

SEQ ID NO: 1440 - protein, 8 aa, Fusobacterium nucleatum
TSKAKAIL

SEQ ID NO: 1441 - protein, 11 aa, Fusobacterium nucleatum
LTMTTAANIAL

SEQ ID NO: 1442 - protein, 9 aa, Fusobacterium nucleatum
VTNKKTITL

SEQ ID NO: 1443 - protein, 10 aa, Fusobacterium nucleatum
ALTGVKTIKL

SEQ ID NO: 1444 - protein, 9 aa, Fusobacterium nucleatum
VLAYLENSK

SEQ ID NO: 1445 - protein, 10 aa, Fusobacterium nucleatum
ILFLMLGVGA

SEQ ID NO: 1446 - protein, 10 aa, Fusobacterium nucleatum
WIATPVLDNY

SEQ ID NO: 1447 - protein, 10 aa, Fusobacterium nucleatum
GIFGKNSSTL

SEQ ID NO: 1448 - protein, 9 aa, Fusobacterium nucleatum
KPKMVLTHV

SEQ ID NO: 1449 - protein, 9 aa, Fusobacterium nucleatum
TGLAGVAVM

SEQ ID NO: 1450 - protein, 9 aa, Fusobacterium nucleatum
MLGEVKSLV

SEQ ID NO: 1451 - protein, 11 aa, Fusobacterium nucleatum
VYAPKANISKV

SEQ ID NO: 1452 - protein, 10 aa, Fusobacterium nucleatum
TNTNAGLIAI

SEQ ID NO: 1453 - protein, 11 aa, Fusobacterium nucleatum
RHYFGTKTLRT

SEQ ID NO: 1454 - protein, 9 aa, Fusobacterium nucleatum
NTDAGTVSL

SEQ ID NO: 1455 - protein, 9 aa, Fusobacterium nucleatum
VLAENTGTI

SEQ ID NO: 1456 - protein, 9 aa, Fusobacterium nucleatum
EILARISPK

SEQ ID NO: 1457 - protein, 11 aa, Fusobacterium nucleatum
GVYLQGASGDK

SEQ ID NO: 1458 - protein, 11 aa, Fusobacterium nucleatum
WYTGIVHNTFK

SEQ ID NO: 1459 - protein, 9 aa, Fusobacterium nucleatum
ATSPSDKAK

SEQ ID NO: 1460 - protein, 10 aa, Fusobacterium nucleatum
WYTGIVHNRF

SEQ ID NO: 1461 - protein, 8 aa, Fusobacterium nucleatum
YSDVSKIV

SEQ ID NO: 1462 - protein, 9 aa, Fusobacterium nucleatum
ATNKDNIGI

SEQ ID NO: 1463 - protein, 9 aa, Fusobacterium nucleatum
STVNIDHWT

SEQ ID NO: 1464 - protein, 10 aa, Fusobacterium nucleatum
EFRLSEDFSI

SEQ ID NO: 1465 - protein, 10 aa, Fusobacterium nucleatum
YTAEGSSNIK

SEQ ID NO: 1466 - protein, 10 aa, Fusobacterium nucleatum
GKDVQGVGVY

SEQ ID NO: 1467 - protein, 9 aa, Fusobacterium nucleatum
ISKVGTITL

SEQ ID NO: 1468 - protein, 9 aa, Fusobacterium nucleatum
KIKEKSGEV

SEQ ID NO: 1469 - protein, 11 aa, Fusobacterium nucleatum
VRLEVKHNDYL

SEQ ID NO: 1470 - protein, 10 aa, Fusobacterium nucleatum
MLGEVKSLVT

SEQ ID NO: 1471 - protein, 10 aa, Fusobacterium nucleatum
YIKNDGEIRI

SEQ ID NO: 1472 - protein, 11 aa, Fusobacterium nucleatum
KAKAILDEDYK

SEQ ID NO: 1473 - protein, 10 aa, Fusobacterium nucleatum
GSRATATNKI

SEQ ID NO: 1474 - protein, 11 aa, Fusobacterium nucleatum
ESITGTKDKAR

SEQ ID NO: 1475 - protein, 9 aa, Fusobacterium nucleatum
GTTVENTGK

SEQ ID NO: 1476 - protein, 10 aa, Fusobacterium nucleatum
IYSKINSSSI

SEQ ID NO: 1477 - protein, 10 aa, Fusobacterium nucleatum
NTKKSVGIYA

SEQ ID NO: 1478 - protein, 9 aa, Fusobacterium nucleatum
KGTWGISWK

SEQ ID NO: 1479 - protein, 9 aa, Fusobacterium nucleatum
NTSTGTITL

SEQ ID NO: 1480 - protein, 9 aa, Fusobacterium nucleatum
YSTGMYGEA

SEQ ID NO: 1481 - protein, 10 aa, Fusobacterium nucleatum
FLYSNGKANI

SEQ ID NO: 1482 - protein, 10 aa, Fusobacterium nucleatum
YTAQGSGDGI

SEQ ID NO: 1483 - protein, 9 aa, Fusobacterium nucleatum
ITAKENIGL

SEQ ID NO: 1484 - protein, 10 aa, Fusobacterium nucleatum
YDEMMGHQYA

SEQ ID NO: 1485 - protein, 9 aa, Fusobacterium nucleatum
AKNSGTINL

SEQ ID NO: 1486 - protein, 8 aa, Fusobacterium nucleatum
VQTKLNVL

SEQ ID NO: 1487 - protein, 11 aa, Fusobacterium nucleatum
RVQATGIVLDK

SEQ ID NO: 1488 - protein, 11 aa, Fusobacterium nucleatum
YNITTPITAGK

SEQ ID NO: 1489 - protein, 8 aa, Fusobacterium nucleatum
NLKPKMVL

SEQ ID NO: 1490 - protein, 10 aa, Fusobacterium nucleatum
FAQAESGKTA

SEQ ID NO: 1491 - protein, 9 aa, Fusobacterium nucleatum
STDSNGSSA

SEQ ID NO: 1492 - protein, 10 aa, Fusobacterium nucleatum
RPLTPGNDSL

SEQ ID NO: 1493 - protein, 9 aa, Fusobacterium nucleatum
DSGTVKNNK

SEQ ID NO: 1494 - protein, 9 aa, Fusobacterium nucleatum
VKDQGVGIY

SEQ ID NO: 1495 - protein, 9 aa, Fusobacterium nucleatum
VEMNGGKIH

SEQ ID NO: 1496 - protein, 9 aa, Fusobacterium nucleatum
GENSGTITM

SEQ ID NO: 1497 - protein, 10 aa, Fusobacterium nucleatum
GMFAQAESGK

SEQ ID NO: 1498 - protein, 9 aa, Fusobacterium nucleatum
NTKKSVGMY

SEQ ID NO: 1499 - protein, 9 aa, Fusobacterium nucleatum
LTLTNQNSI

SEQ ID NO: 1500 - protein, 9 aa, Fusobacterium nucleatum
NTKETVGMM

SEQ ID NO: 1501 - protein, 9 aa, Fusobacterium nucleatum
TNGIIVSAK

SEQ ID NO: 1502 - protein, 10 aa, Fusobacterium nucleatum
GMAGDSSTVT

SEQ ID NO: 1503 - protein, 9 aa, Fusobacterium nucleatum
STLTGVKTI

SEQ ID NO: 1504 - protein, 10 aa, Fusobacterium nucleatum
GDGIIGLLLK

SEQ ID NO: 1505 - protein, 9 aa, Fusobacterium nucleatum
AGVPTMPVR

SEQ ID NO: 1506 - protein, 11 aa, Fusobacterium nucleatum
NTVTNSPLLSK

SEQ ID NO: 1507 - protein, 11 aa, Fusobacterium nucleatum
STAMFINSARA

SEQ ID NO: 1508 - protein, 11 aa, Fusobacterium nucleatum
NSIGIYGFYNK

SEQ ID NO: 1509 - protein, 8 aa, Fusobacterium nucleatum
IFIGHNKL

SEQ ID NO: 1510 - protein, 10 aa, Fusobacterium nucleatum
TSDKINIVSF

SEQ ID NO: 1511 - protein, 11 aa, Fusobacterium nucleatum
RSIAKRYKSVK

SEQ ID NO: 1512 - protein, 9 aa, Fusobacterium nucleatum
GLQTKINDA

SEQ ID NO: 1513 - protein, 9 aa, Fusobacterium nucleatum
ENSIGFYGK

SEQ ID NO: 1514 - protein, 8 aa, Fusobacterium nucleatum
IASEGTTF

SEQ ID NO: 1515 - protein, 9 aa, Fusobacterium nucleatum
IEIVEKKSA

SEQ ID NO: 1516 - protein, 8 aa, Fusobacterium nucleatum
YNKMHRKF

SEQ ID NO: 1517 - protein, 9 aa, Fusobacterium nucleatum
SDKINIVSF

SEQ ID NO: 1518 - protein, 9 aa, Fusobacterium nucleatum
AILDEDYKV

SEQ ID NO: 1519 - protein, 9 aa, Fusobacterium nucleatum
LETNTNAGL

SEQ ID NO: 1520 - protein, 10 aa, Fusobacterium nucleatum
WSNPSKDSNK

SEQ ID NO: 1521 - protein, 10 aa, Fusobacterium nucleatum
FLYSNGKAII

SEQ ID NO: 1522 - protein, 10 aa, Fusobacterium nucleatum
YGTITTTDSY

SEQ ID NO: 1523 - protein, 11 aa, Fusobacterium nucleatum
LSDSKYTSGVY

SEQ ID NO: 1524 - protein, 10 aa, Fusobacterium nucleatum
NNTFEIETGK

SEQ ID NO: 1525 - protein, 10 aa, Fusobacterium nucleatum
VERYAVIKNY

SEQ ID NO: 1526 - protein, 10 aa, Fusobacterium nucleatum
NPQVNEPLPA

SEQ ID NO: 1527 - protein, 9 aa, Fusobacterium nucleatum
SSDPEGQEL

SEQ ID NO: 1528 - protein, 10 aa, Fusobacterium nucleatum
IRPEIGTELA

SEQ ID NO: 1529 - protein, 10 aa, Fusobacterium nucleatum
YLKNSIAQLD

SEQ ID NO: 1530 - protein, 11 aa, Fusobacterium nucleatum
AGTPYNITTPI

SEQ ID NO: 1531 - protein, 10 aa, Fusobacterium nucleatum
TEKKTSAGML

SEQ ID NO: 1532 - protein, 9 aa, Fusobacterium nucleatum
KVSANNKIL

SEQ ID NO: 1533 - protein, 9 aa, Fusobacterium nucleatum
QLQAKVGLF

SEQ ID NO: 1534 - protein, 10 aa, Fusobacterium nucleatum
SYGVLIRGKR

SEQ ID NO: 1535 - protein, 11 aa, Fusobacterium nucleatum
GRILVGATDDI

SEQ ID NO: 1536 - protein, 11 aa, Fusobacterium nucleatum
LGLSDIGFYVD

SEQ ID NO: 1537 - protein, 10 aa, Fusobacterium nucleatum
STLENHGKIY

SEQ ID NO: 1538 - protein, 10 aa, Fusobacterium nucleatum
TYGIGIKNEI

SEQ ID NO: 1539 - protein, 9 aa, Fusobacterium nucleatum
HGNSAEEVR

SEQ ID NO: 1540 - protein, 9 aa, Fusobacterium nucleatum
LYSNGKAII

SEQ ID NO: 1541 - protein, 9 aa, Fusobacterium nucleatum
VYVDDGATF

SEQ ID NO: 1542 - protein, 9 aa, Fusobacterium nucleatum
KYNAYGVAY

SEQ ID NO: 1543 - protein, 11 aa, Fusobacterium nucleatum
TSISSVSKNVK

SEQ ID NO: 1544 - protein, 9 aa, Fusobacterium nucleatum
GLIAINGTV

SEQ ID NO: 1545 - protein, 9 aa, Fusobacterium nucleatum
ISTALNNAR

SEQ ID NO: 1546 - protein, 9 aa, Fusobacterium nucleatum
LSAKKSTGI

SEQ ID NO: 1547 - protein, 11 aa, Fusobacterium nucleatum
SANNSNHLIAF

SEQ ID NO: 1548 - protein, 9 aa, Fusobacterium nucleatum
KESVGMYAT

SEQ ID NO: 1549 - protein, 10 aa, Fusobacterium nucleatum
TLRTSVGVAY

SEQ ID NO: 1550 - protein, 10 aa, Fusobacterium nucleatum
VGLDNQRLGV

SEQ ID NO: 1551 - protein, 11 aa, Fusobacterium nucleatum
SQESAGIYAPK

SEQ ID NO: 1552 - protein, 10 aa, Fusobacterium nucleatum
VTASTAKLSL

SEQ ID NO: 1553 - protein, 10 aa, Fusobacterium nucleatum
DIGKITGYGV

SEQ ID NO: 1554 - protein, 10 aa, Fusobacterium nucleatum
GSTYKGSGDK

SEQ ID NO: 1555 - protein, 10 aa, Fusobacterium nucleatum
GIYSKTPSNV

SEQ ID NO: 1556 - protein, 11 aa, Fusobacterium nucleatum
NLGLSDIGFYV

SEQ ID NO: 1557 - protein, 11 aa, Fusobacterium nucleatum
ATNKGRVYVGK

SEQ ID NO: 1558 - protein, 11 aa, Fusobacterium nucleatum
SARGKNDGTIK

SEQ ID NO: 1559 - protein, 9 aa, Fusobacterium nucleatum
RPEIGTELA

SEQ ID NO: 1560 - protein, 8 aa, Fusobacterium nucleatum
KVHINGNK

SEQ ID NO: 1561 - protein, 9 aa, Fusobacterium nucleatum
TTVENTGKI

SEQ ID NO: 1562 - protein, 11 aa, Fusobacterium nucleatum
KFKDIGNSKEK

SEQ ID NO: 1563 - protein, 10 aa, Fusobacterium nucleatum
IAFYGKNSDI

SEQ ID NO: 1564 - protein, 10 aa, Fusobacterium nucleatum
ASRNTTMSHM

SEQ ID NO: 1565 - protein, 11 aa, Fusobacterium nucleatum
ISWKDVSQAYI

SEQ ID NO: 1566 - protein, 8 aa, Fusobacterium nucleatum
KEEESVGM

SEQ ID NO: 1567 - protein, 9 aa, Fusobacterium nucleatum
FIGHNKLER

SEQ ID NO: 1568 - protein, 11 aa, Fusobacterium nucleatum
SGTIDIAGTSK

SEQ ID NO: 1569 - protein, 8 aa, Fusobacterium nucleatum
KVKTFGMK

SEQ ID NO: 1570 - protein, 11 aa, Fusobacterium nucleatum
EKRIFNKLNSI

SEQ ID NO: 1571 - protein, 10 aa, Fusobacterium nucleatum
KVAYTNADWF

SEQ ID NO: 1572 - protein, 10 aa, Fusobacterium nucleatum
TNKGTIITEK

SEQ ID NO: 1573 - protein, 8 aa, Fusobacterium nucleatum
SWQFGMNY

SEQ ID NO: 1574 - protein, 9 aa, Fusobacterium nucleatum
HVKDQGVGI

SEQ ID NO: 1575 - protein, 10 aa, Fusobacterium nucleatum
IVHNTFKFKD

SEQ ID NO: 1576 - protein, 11 aa, Fusobacterium nucleatum
ELAYRHYFGIK

SEQ ID NO: 1577 - protein, 10 aa, Fusobacterium nucleatum
IKESLIGMFA

SEQ ID NO: 1578 - protein, 10 aa, Fusobacterium nucleatum
VGMAGDSSTV

SEQ ID NO: 1579 - protein, 10 aa, Fusobacterium nucleatum
DKIQSMTGVY

SEQ ID NO: 1580 - protein, 11 aa, Fusobacterium nucleatum
KSLVTNNSATL

SEQ ID NO: 1581 - protein, 9 aa, Fusobacterium nucleatum
KGRVYVGKT

SEQ ID NO: 1582 - protein, 9 aa, Fusobacterium nucleatum
TKFNNTFKI

SEQ ID NO: 1583 - protein, 9 aa, Fusobacterium nucleatum
GEKSIGIYS

SEQ ID NO: 1584 - protein, 10 aa, Fusobacterium nucleatum
KSIGMYGKGV

SEQ ID NO: 1585 - protein, 10 aa, Fusobacterium nucleatum
MLSKDTSSIA

SEQ ID NO: 1586 - protein, 9 aa, Fusobacterium nucleatum
TSIAGSLTW

SEQ ID NO: 1587 - protein, 10 aa, Fusobacterium nucleatum
SVKYSLGLAI

SEQ ID NO: 1588 - protein, 10 aa, Fusobacterium nucleatum
KESLIGMFAQ

SEQ ID NO: 1589 - protein, 9 aa, Fusobacterium nucleatum
TEKKTSAGI

SEQ ID NO: 1590 - protein, 10 aa, Fusobacterium nucleatum
KTNKKQWFVK

SEQ ID NO: 1591 - protein, 8 aa, Fusobacterium nucleatum
KLERKFLV

SEQ ID NO: 1592 - protein, 9 aa, Fusobacterium nucleatum
TSAGILAEI

SEQ ID NO: 1593 - protein, 9 aa, Fusobacterium nucleatum
IKESLIGMF

SEQ ID NO: 1594 - protein, 10 aa, Fusobacterium nucleatum
EGASLFYATL

SEQ ID NO: 1595 - protein, 9 aa, Fusobacterium nucleatum
GEVNIKAPI

SEQ ID NO: 1596 - protein, 11 aa, Fusobacterium nucleatum
IKLGQDSTGLF

SEQ ID NO: 1597 - protein, 9 aa, Fusobacterium nucleatum
IYNNKSIGM

SEQ ID NO: 1598 - protein, 11 aa, Fusobacterium nucleatum
FVRDNGTGSGV

SEQ ID NO: 1599 - protein, 11 aa, Fusobacterium nucleatum
ITVSEETSAGM

SEQ ID NO: 1600 - protein, 9 aa, Fusobacterium nucleatum
TVENTGKIY

SEQ ID NO: 1601 - protein, 10 aa, Fusobacterium nucleatum
KNNGTNDTAK

SEQ ID NO: 1602 - protein, 9 aa, Fusobacterium nucleatum
YAKNDASNI

SEQ ID NO: 1603 - protein, 9 aa, Fusobacterium nucleatum
GTINFSTGK

SEQ ID NO: 1604 - protein, 11 aa, Fusobacterium nucleatum
SGKTASVKNTK

SEQ ID NO: 1605 - protein, 9 aa, Fusobacterium nucleatum
EAVGIFAKN

SEQ ID NO: 1606 - protein, 8 aa, Fusobacterium nucleatum
IASEGTEF

SEQ ID NO: 1607 - protein, 10 aa, Fusobacterium nucleatum
LEPTIGIYTA

SEQ ID NO: 1608 - protein, 10 aa, Fusobacterium nucleatum
GHQYANVQQR

SEQ ID NO: 1609 - protein, 10 aa, Fusobacterium nucleatum
FYVDTLGRTK

SEQ ID NO: 1610 - protein, 11 aa, Fusobacterium nucleatum
KTISVTAEKGV

SEQ ID NO: 1611 - protein, 10 aa, Fusobacterium nucleatum
KIELEAVSSA

SEQ ID NO: 1612 - protein, 10 aa, Fusobacterium nucleatum
TQSEVTNSGL

SEQ ID NO: 1613 - protein, 11 aa, Fusobacterium nucleatum
DTTGIPNSNVK

SEQ ID NO: 1614 - protein, 10 aa, Fusobacterium nucleatum
AAMLGEVKSL

SEQ ID NO: 1615 - protein, 9 aa, Fusobacterium nucleatum
KNIGILADK

SEQ ID NO: 1616 - protein, 9 aa, Fusobacterium nucleatum
NALDSVEKR

SEQ ID NO: 1617 - protein, 10 aa, Fusobacterium nucleatum
SLFYATSKAK

SEQ ID NO: 1618 - protein, 9 aa, Fusobacterium nucleatum
ASHLIAFYI

SEQ ID NO: 1619 - protein, 9 aa, Fusobacterium nucleatum
TGKGNIGIY

SEQ ID NO: 1620 - protein, 10 aa, Fusobacterium nucleatum
LGATQNTMLY

SEQ ID NO: 1621 - protein, 11 aa, Fusobacterium nucleatum
GETSIATGKTV

SEQ ID NO: 1622 - protein, 11 aa, Fusobacterium nucleatum
FLKDANFVSDA

SEQ ID NO: 1623 - protein, 9 aa, Fusobacterium nucleatum
GMLAQNNGK

SEQ ID NO: 1624 - protein, 10 aa, Fusobacterium nucleatum
KSNISKVGTI

SEQ ID NO: 1625 - protein, 9 aa, Fusobacterium nucleatum
WTISGDIFI

SEQ ID NO: 1626 - protein, 8 aa, Fusobacterium nucleatum
SQAYIDEL

SEQ ID NO: 1627 - protein, 9 aa, Fusobacterium nucleatum
YENELGRVA

SEQ ID NO: 1628 - protein, 9 aa, Fusobacterium nucleatum
YVDDGATFK

SEQ ID NO: 1629 - protein, 10 aa, Fusobacterium nucleatum
TVKNNKTISV

SEQ ID NO: 1630 - protein, 8 aa, Fusobacterium nucleatum
MLYLKNSI

SEQ ID NO: 1631 - protein, 10 aa, Fusobacterium nucleatum
LAEKKKSAGM

SEQ ID NO: 1632 - protein, 11 aa, Fusobacterium nucleatum
GVFAGVPTMPV

SEQ ID NO: 1633 - protein, 9 aa, Fusobacterium nucleatum
KFINRGEIR

SEQ ID NO: 1634 - protein, 8 aa, Fusobacterium nucleatum
AVSSAGVY

SEQ ID NO: 1635 - protein, 8 aa, Fusobacterium nucleatum
SSAGIQLK

SEQ ID NO: 1636 - protein, 9 aa, Fusobacterium nucleatum
TIDFSAAEK

SEQ ID NO: 1637 - protein, 11 aa, Fusobacterium nucleatum
KAKVAYTNADW

SEQ ID NO: 1638 - protein, 9 aa, Fusobacterium nucleatum
SVKYSLGLA

SEQ ID NO: 1639 - protein, 9 aa, Fusobacterium nucleatum
SVAKNNGTL

SEQ ID NO: 1640 - protein, 11 aa, Fusobacterium nucleatum
GQDTKVSANNK

SEQ ID NO: 1641 - protein, 9 aa, Fusobacterium nucleatum
MYVKNGTSK

SEQ ID NO: 1642 - protein, 9 aa, Fusobacterium nucleatum
NSVTNTGNI

SEQ ID NO: 1643 - protein, 9 aa, Fusobacterium nucleatum
SGDGIIGLL

SEQ ID NO: 1644 - protein, 9 aa, Fusobacterium nucleatum
QRVQATGIV

SEQ ID NO: 1645 - protein, 9 aa, Fusobacterium nucleatum
FLYSNGKAI

SEQ ID NO: 1646 - protein, 10 aa, Fusobacterium nucleatum
LGDASTGMYL

SEQ ID NO: 1647 - protein, 9 aa, Fusobacterium nucleatum
STATNKGAI

SEQ ID NO: 1648 - protein, 9 aa, Fusobacterium nucleatum
FYIKNGGNF

SEQ ID NO: 1649 - protein, 8 aa, Fusobacterium nucleatum
GIYGFYNK

SEQ ID NO: 1650 - protein, 10 aa, Fusobacterium nucleatum
YFYDHWGSEY

SEQ ID NO: 1651 - protein, 8 aa, Fusobacterium nucleatum
QETGISNL

SEQ ID NO: 1652 - protein, 8 aa, Fusobacterium nucleatum
EEMSAGMY

SEQ ID NO: 1653 - protein, 10 aa, Fusobacterium nucleatum
NTGNIEVAQK

SEQ ID NO: 1654 - protein, 10 aa, Fusobacterium nucleatum
FVGYNKMHRK

SEQ ID NO: 1655 - protein, 10 aa, Fusobacterium nucleatum
STGTITLENK

SEQ ID NO: 1656 - protein, 10 aa, Fusobacterium nucleatum
GTVTMGNDSV

SEQ ID NO: 1657 - protein, 10 aa, Fusobacterium nucleatum
IAENKGIILA

SEQ ID NO: 1658 - protein, 10 aa, Fusobacterium nucleatum
GTIDIAGTSK

SEQ ID NO: 1659 - protein, 10 aa, Fusobacterium nucleatum
KINFTNTGNI

SEQ ID NO: 1660 - protein, 11 aa, Fusobacterium nucleatum
ITLDTNYSTGM

SEQ ID NO: 1661 - protein, 9 aa, Fusobacterium nucleatum
AEGIKNHSM

SEQ ID NO: 1662 - protein, 10 aa, Fusobacterium nucleatum
KARGILATNS

SEQ ID NO: 1663 - protein, 11 aa, Fusobacterium nucleatum
ANSFEPAIGIY

SEQ ID NO: 1664 - protein, 10 aa, Fusobacterium nucleatum
TISGDIFVGY

SEQ ID NO: 1665 - protein, 10 aa, Fusobacterium nucleatum
NLYKVEKDLR

SEQ ID NO: 1666 - protein, 10 aa, Fusobacterium nucleatum
ANGKKSAGVY

SEQ ID NO: 1667 - protein, 10 aa, Fusobacterium nucleatum
SLNAPSSAGI

SEQ ID NO: 1668 - protein, 10 aa, Fusobacterium nucleatum
KRIFNKLNGI

SEQ ID NO: 1669 - protein, 10 aa, Fusobacterium nucleatum
GSNIQGVGVY

SEQ ID NO: 1670 - protein, 8 aa, Fusobacterium nucleatum
KGRVYVGK

SEQ ID NO: 1671 - protein, 9 aa, Fusobacterium nucleatum
GKKTLGVFL

SEQ ID NO: 1672 - protein, 11 aa, Fusobacterium nucleatum
SEDFSIRPYGA

SEQ ID NO: 1673 - protein, 11 aa, Fusobacterium nucleatum
SGTNGIIVSAK

SEQ ID NO: 1674 - protein, 10 aa, Fusobacterium nucleatum
GEKAVGLYSA

SEQ ID NO: 1675 - protein, 10 aa, Fusobacterium nucleatum
GANIGKITGY

SEQ ID NO: 1676 - protein, 10 aa, Fusobacterium nucleatum
INANKNLKPK

SEQ ID NO: 1677 - protein, 10 aa, Fusobacterium nucleatum
APSAPSAPTI

SEQ ID NO: 1678 - protein, 11 aa, Fusobacterium nucleatum
KTIKVTAESGV

SEQ ID NO: 1679 - protein, 11 aa, Fusobacterium nucleatum
FNNTFKIESGK

SEQ ID NO: 1680 - protein, 9 aa, Fusobacterium nucleatum
ATKKLSTVN

SEQ ID NO: 1681 - protein, 9 aa, Fusobacterium nucleatum
AEAGKKANV

SEQ ID NO: 1682 - protein, 9 aa, Fusobacterium nucleatum
NIADSANSL

SEQ ID NO: 1683 - protein, 10 aa, Fusobacterium nucleatum
QRVQATGIVL

SEQ ID NO: 1684 - protein, 8 aa, Fusobacterium nucleatum
HYFGTKTL

SEQ ID NO: 1685 - protein, 11 aa, Fusobacterium nucleatum
KPQKYLFNGIY

SEQ ID NO: 1686 - protein, 9 aa, Fusobacterium nucleatum
TVSNGSSAV

SEQ ID NO: 1687 - protein, 11 aa, Fusobacterium nucleatum
VELGKNSTFGL

SEQ ID NO: 1688 - protein, 9 aa, Fusobacterium nucleatum
LKAESGIGM

SEQ ID NO: 1689 - protein, 9 aa, Fusobacterium nucleatum
GTVSGLNET

SEQ ID NO: 1690 - protein, 9 aa, Fusobacterium nucleatum
RNSWSNPSK

SEQ ID NO: 1691 - protein, 11 aa, Fusobacterium nucleatum
EQLQAKVGLFK

SEQ ID NO: 1692 - protein, 8 aa, Fusobacterium nucleatum
SEETSAGM

SEQ ID NO: 1693 - protein, 10 aa, Fusobacterium nucleatum
MLGEDSGTVK

SEQ ID NO: 1694 - protein, 9 aa, Fusobacterium nucleatum
MAKLPYTSF

SEQ ID NO: 1695 - protein, 11 aa, Fusobacterium nucleatum
ALKVEYGRVSK

SEQ ID NO: 1696 - protein, 10 aa, Fusobacterium nucleatum
EGASIFYATL

SEQ ID NO: 1697 - protein, 10 aa, Fusobacterium nucleatum
NGKAIINNKR

SEQ ID NO: 1698 - protein, 11 aa, Fusobacterium nucleatum
FNNTFKIETGK

SEQ ID NO: 1699 - protein, 9 aa, Fusobacterium nucleatum
SIGMYGKGV

SEQ ID NO: 1700 - protein, 11 aa, Fusobacterium nucleatum
NSIGIMGEKSK

SEQ ID NO: 1701 - protein, 10 aa, Fusobacterium nucleatum
KVTLGSNTIK

SEQ ID NO: 1702 - protein, 9 aa, Fusobacterium nucleatum
NSGTINLGK

SEQ ID NO: 1703 - protein, 9 aa, Fusobacterium nucleatum
NTFKIESGK

SEQ ID NO: 1704 - protein, 9 aa, Fusobacterium nucleatum
LFYATLKAK

SEQ ID NO: 1705 - protein, 8 aa, Fusobacterium nucleatum
KPEVGTEL

SEQ ID NO: 1706 - protein, 11 aa, Fusobacterium nucleatum
KSTAMFINSAR

SEQ ID NO: 1707 - protein, 10 aa, Fusobacterium nucleatum
EEAVGVFAGV

SEQ ID NO: 1708 - protein, 9 aa, Fusobacterium nucleatum
TTGIPNSNV

SEQ ID NO: 1709 - protein, 9 aa, Fusobacterium nucleatum
NIITLNGKK

SEQ ID NO: 1710 - protein, 9 aa, Fusobacterium nucleatum
SVEKRIFNK

SEQ ID NO: 1711 - protein, 11 aa, Fusobacterium nucleatum
AGTTADWFNIR

SEQ ID NO: 1712 - protein, 10 aa, Fusobacterium nucleatum
KENDYLSIRP

SEQ ID NO: 1713 - protein, 9 aa, Fusobacterium nucleatum
AMFINSARA

SEQ ID NO: 1714 - protein, 10 aa, Fusobacterium nucleatum
TNEKNIGILA

SEQ ID NO: 1715 - protein, 9 aa, Fusobacterium nucleatum
NAWNFADGL

SEQ ID NO: 1716 - protein, 11 aa, Fusobacterium nucleatum
SGKTLDVELGK

SEQ ID NO: 1717 - protein, 10 aa, Fusobacterium nucleatum
LTSSSATNEK

SEQ ID NO: 1718 - protein, 8 aa, Fusobacterium nucleatum
RVANGKNK

SEQ ID NO: 1719 - protein, 10 aa, Fusobacterium nucleatum
GLQTKINDAR

SEQ ID NO: 1720 - protein, 11 aa, Fusobacterium nucleatum
ATNSNLTNNSK

SEQ ID NO: 1721 - protein, 8 aa, Fusobacterium nucleatum
IYAPKSNI

SEQ ID NO: 1722 - protein, 9 aa, Fusobacterium nucleatum
VIKPFLDQI

SEQ ID NO: 1723 - protein, 11 aa, Fusobacterium nucleatum
KNKAKVAYTNA

SEQ ID NO: 1724 - protein, 8 aa, Fusobacterium nucleatum
GEIGRSAL

SEQ ID NO: 1725 - protein, 10 aa, Fusobacterium nucleatum
ITAGKSGVGI

SEQ ID NO: 1726 - protein, 8 aa, Fusobacterium nucleatum
HYFGAKTL

SEQ ID NO: 1727 - protein, 9 aa, Fusobacterium nucleatum
EGQELRGAK

SEQ ID NO: 1728 - protein, 9 aa, Fusobacterium nucleatum
ISSVSKNVK

SEQ ID NO: 1729 - protein, 8 aa, Fusobacterium nucleatum
FTNTGNIY

SEQ ID NO: 1730 - protein, 9 aa, Fusobacterium nucleatum
IYSNAGSGK

SEQ ID NO: 1731 - protein, 10 aa, Fusobacterium nucleatum
GMYVENSSAT

SEQ ID NO: 1732 - protein, 9 aa, Fusobacterium nucleatum
ISGDMFVGY

SEQ ID NO: 1733 - protein, 10 aa, Fusobacterium nucleatum
LSGAESIGIY

SEQ ID NO: 1734 - protein, 10 aa, Fusobacterium nucleatum
FKFKDIGNSK

SEQ ID NO: 1735 - protein, 11 aa, Fusobacterium nucleatum
KSKYYTYGIGV

SEQ ID NO: 1736 - protein, 8 aa, Fusobacterium nucleatum
VQATGNIL

SEQ ID NO: 1737 - protein, 9 aa, Fusobacterium nucleatum
TIDIAGTSK

SEQ ID NO: 1738 - protein, 10 aa, Fusobacterium nucleatum
TLLNDTNGNI

SEQ ID NO: 1739 - protein, 9 aa, Fusobacterium nucleatum
ADASRNTTM

SEQ ID NO: 1740 - protein, 11 aa, Fusobacterium nucleatum
VLAYLENSKFI

SEQ ID NO: 1741 - protein, 10 aa, Fusobacterium nucleatum
QLQAKVGLFK

SEQ ID NO: 1742 - protein, 10 aa, Fusobacterium nucleatum
SALTGVKTIK

SEQ ID NO: 1743 - protein, 9 aa, Fusobacterium nucleatum
SWKDVSQAY

SEQ ID NO: 1744 - protein, 8 aa, Fusobacterium nucleatum
SIFYATLK

SEQ ID NO: 1745 - protein, 9 aa, Fusobacterium nucleatum
KFVSHLGNL

SEQ ID NO: 1746 - protein, 10 aa, Fusobacterium nucleatum
ASIFYATLKA

SEQ ID NO: 1747 - protein, 9 aa, Fusobacterium nucleatum
NGNITINQK

SEQ ID NO: 1748 - protein, 11 aa, Fusobacterium nucleatum
FLKDANFVSNA

SEQ ID NO: 1749 - protein, 8 aa, Fusobacterium nucleatum
ATNKIQSM

SEQ ID NO: 1750 - protein, 9 aa, Fusobacterium nucleatum
NTKKSVGIY

SEQ ID NO: 1751 - protein, 10 aa, Fusobacterium nucleatum
VAIASEGTEF

SEQ ID NO: 1752 - protein, 8 aa, Fusobacterium nucleatum
ILARISPK

SEQ ID NO: 1753 - protein, 9 aa, Fusobacterium nucleatum
NKTMGRVLM

SEQ ID NO: 1754 - protein, 10 aa, Fusobacterium nucleatum
KITNTGTGTK

SEQ ID NO: 1755 - protein, 11 aa, Fusobacterium nucleatum
ANGENSGTITM

SEQ ID NO: 1756 - protein, 9 aa, Fusobacterium nucleatum
LVTNESAVI

SEQ ID NO: 1757 - protein, 11 aa, Fusobacterium nucleatum
GLYSKGQSNTV

SEQ ID NO: 1758 - protein, 10 aa, Fusobacterium nucleatum
YTYGIGIKNE

SEQ ID NO: 1759 - protein, 9 aa, Fusobacterium nucleatum
DADNSYGVL

SEQ ID NO: 1760 - protein, 9 aa, Fusobacterium nucleatum
VLAEKYKVT

SEQ ID NO: 1761 - protein, 10 aa, Fusobacterium nucleatum
TGENTSTGTI

SEQ ID NO: 1762 - protein, 9 aa, Fusobacterium nucleatum
ESGVGIFVR

SEQ ID NO: 1763 - protein, 8 aa, Fusobacterium nucleatum
TSVGIYAK

SEQ ID NO: 1764 - protein, 9 aa, Fusobacterium nucleatum
VADGYTGAY

SEQ ID NO: 1765 - protein, 11 aa, Fusobacterium nucleatum
WSSWQFGMNYF

SEQ ID NO: 1766 - protein, 10 aa, Fusobacterium nucleatum
EESSVGIYSK

SEQ ID NO: 1767 - protein, 10 aa, Fusobacterium nucleatum
VADGYTGAYI

SEQ ID NO: 1768 - protein, 11 aa, Fusobacterium nucleatum
TITTTDSYAGR

SEQ ID NO: 1769 - protein, 10 aa, Fusobacterium nucleatum
TVTNTGDITV

SEQ ID NO: 1770 - protein, 9 aa, Fusobacterium nucleatum
STQNTMLYL

SEQ ID NO: 1771 - protein, 9 aa, Fusobacterium nucleatum
GSDVDVSHW

SEQ ID NO: 1772 - protein, 10 aa, Fusobacterium nucleatum
KMSAENSIGI

SEQ ID NO: 1773 - protein, 10 aa, Fusobacterium nucleatum
LAYLENSKFV

SEQ ID NO: 1774 - protein, 9 aa, Fusobacterium nucleatum
KKTDNAWNF

SEQ ID NO: 1775 - protein, 9 aa, Fusobacterium nucleatum
KLDYTLQGT

SEQ ID NO: 1776 - protein, 10 aa, Fusobacterium nucleatum
MEIGDGTTAG

SEQ ID NO: 1777 - protein, 9 aa, Fusobacterium nucleatum
KRATGINEK

SEQ ID NO: 1778 - protein, 9 aa, Fusobacterium nucleatum
DAAYSTGML

SEQ ID NO: 1779 - protein, 9 aa, Fusobacterium nucleatum
LNVGLDNQR

SEQ ID NO: 1780 - protein, 11 aa, Fusobacterium nucleatum
MVVNESTAVGK

SEQ ID NO: 1781 - protein, 11 aa, Fusobacterium nucleatum
IYAPGGKATNK

SEQ ID NO: 1782 - protein, 9 aa, Fusobacterium nucleatum
GNNKIAENK

SEQ ID NO: 1783 - protein, 10 aa, Fusobacterium nucleatum
LNWTISGDIF

SEQ ID NO: 1784 - protein, 10 aa, Fusobacterium nucleatum
GTIDFSTGKG

SEQ ID NO: 1785 - protein, 9 aa, Fusobacterium nucleatum
DNIGILANK

SEQ ID NO: 1786 - protein, 9 aa, Fusobacterium nucleatum
VKFDLNVGL

SEQ ID NO: 1787 - protein, 9 aa, Fusobacterium nucleatum
AESGVGIFV

SEQ ID NO: 1788 - protein, 11 aa, Fusobacterium nucleatum
MTGKVYTDVSK

SEQ ID NO: 1789 - protein, 11 aa, Fusobacterium nucleatum
KPRMVLTHVIN

SEQ ID NO: 1790 - protein, 9 aa, Fusobacterium nucleatum
KEPTNEVEI

SEQ ID NO: 1791 - protein, 10 aa, Fusobacterium nucleatum
LEAPDVNPQV

SEQ ID NO: 1792 - protein, 11 aa, Fusobacterium nucleatum
VGVAVMNGSTL

SEQ ID NO: 1793 - protein, 11 aa, Fusobacterium nucleatum
GQITSESGATK

SEQ ID NO: 1794 - protein, 11 aa, Fusobacterium nucleatum
FEAVNHGTIDF

SEQ ID NO: 1795 - protein, 11 aa, Fusobacterium nucleatum
AVGLYSADPTK

SEQ ID NO: 1796 - protein, 9 aa, Fusobacterium nucleatum
ELETTSNSK

SEQ ID NO: 1797 - protein, 9 aa, Fusobacterium nucleatum
TLGSNTIKL

SEQ ID NO: 1798 - protein, 9 aa, Fusobacterium nucleatum
NLGKVNQNR

SEQ ID NO: 1799 - protein, 10 aa, Fusobacterium nucleatum
TGSKLKIGEK

SEQ ID NO: 1800 - protein, 10 aa, Fusobacterium nucleatum
LMAEGIKNPT

SEQ ID NO: 1801 - protein, 9 aa, Fusobacterium nucleatum
IINNRTINA

SEQ ID NO: 1802 - protein, 8 aa, Fusobacterium nucleatum
YSDGDTKV

SEQ ID NO: 1803 - protein, 9 aa, Fusobacterium nucleatum
KLKIGEKAV

SEQ ID NO: 1804 - protein, 9 aa, Fusobacterium nucleatum
KGIGIYTSA

SEQ ID NO: 1805 - protein, 8 aa, Fusobacterium nucleatum
YRHYFGIK

SEQ ID NO: 1806 - protein, 11 aa, Fusobacterium nucleatum
SGTTSEIIVNK

SEQ ID NO: 1807 - protein, 10 aa, Fusobacterium nucleatum
KAKYAIGIYA

SEQ ID NO: 1808 - protein, 11 aa, Fusobacterium nucleatum
STGLFLKDANF

SEQ ID NO: 1809 - protein, 9 aa, Fusobacterium nucleatum
NGIIVSAKK

SEQ ID NO: 1810 - protein, 10 aa, Fusobacterium nucleatum
GKATTVTNKK

SEQ ID NO: 1811 - protein, 11 aa, Fusobacterium nucleatum
TGAYIEGNSTL

SEQ ID NO: 1812 - protein, 10 aa, Fusobacterium nucleatum
IGFYVDTLGR

SEQ ID NO: 1813 - protein, 11 aa, Fusobacterium nucleatum
TLDKNTSKLDY

SEQ ID NO: 1814 - protein, 9 aa, Fusobacterium nucleatum
GEKGIGMLA

SEQ ID NO: 1815 - protein, 9 aa, Fusobacterium nucleatum
GMYGKGIGT

SEQ ID NO: 1816 - protein, 9 aa, Fusobacterium nucleatum
EPAIGIYTA

SEQ ID NO: 1817 - protein, 10 aa, Fusobacterium nucleatum
GIFGEDNSTL

SEQ ID NO: 1818 - protein, 11 aa, Fusobacterium nucleatum
FVGYNKMHRKF

SEQ ID NO: 1819 - protein, 10 aa, Fusobacterium nucleatum
YKYNAYGVAY

SEQ ID NO: 1820 - protein, 9 aa, Fusobacterium nucleatum
KTVTNSGTI

SEQ ID NO: 1821 - protein, 11 aa, Fusobacterium nucleatum
GKVNQNRVAYY

SEQ ID NO: 1822 - protein, 10 aa, Fusobacterium nucleatum
VSNGSSAVYV

SEQ ID NO: 1823 - protein, 10 aa, Fusobacterium nucleatum
IEGNSALTGV

SEQ ID NO: 1824 - protein, 10 aa, Fusobacterium nucleatum
FSIRPYGALK

SEQ ID NO: 1825 - protein, 10 aa, Fusobacterium nucleatum
IKTLRTSLEV

SEQ ID NO: 1826 - protein, 9 aa, Fusobacterium nucleatum
GLRLELIQL

SEQ ID NO: 1827 - protein, 9 aa, Fusobacterium nucleatum
SNHLIAFYI

SEQ ID NO: 1828 - protein, 8 aa, Fusobacterium nucleatum
KEQIAFGF

SEQ ID NO: 1829 - protein, 11 aa, Fusobacterium nucleatum
KVEKDLRSIAK

SEQ ID NO: 1830 - protein, 11 aa, Fusobacterium nucleatum
KTNKKQWFVKG

SEQ ID NO: 1831 - protein, 11 aa, Fusobacterium nucleatum
GIMVVNESTAV

SEQ ID NO: 1832 - protein, 9 aa, Fusobacterium nucleatum
RRGNVKFDL

SEQ ID NO: 1833 - protein, 9 aa, Fusobacterium nucleatum
KPTFLRNGV

SEQ ID NO: 1834 - protein, 9 aa, Fusobacterium nucleatum
KNIITLNGK

SEQ ID NO: 1835 - protein, 10 aa, Fusobacterium nucleatum
ELAYKHYFGA

SEQ ID NO: 1836 - protein, 10 aa, Fusobacterium nucleatum
GVAYENELGR

SEQ ID NO: 1837 - protein, 8 aa, Fusobacterium nucleatum
FVSHLGNL

SEQ ID NO: 1838 - protein, 10 aa, Fusobacterium nucleatum
SQLIIGTEYS

SEQ ID NO: 1839 - protein, 10 aa, Fusobacterium nucleatum
DGSRATATNK

SEQ ID NO: 1840 - protein, 9 aa, Fusobacterium nucleatum
IFADKDSNI

SEQ ID NO: 1841 - protein, 9 aa, Fusobacterium nucleatum
KESVGIYAK

SEQ ID NO: 1842 - protein, 9 aa, Fusobacterium nucleatum
SAAMLGEVK

SEQ ID NO: 1843 - protein, 8 aa, Fusobacterium nucleatum
MAADNGGY

SEQ ID NO: 1844 - protein, 10 aa, Fusobacterium nucleatum
RIFNKLNSIG

SEQ ID NO: 1845 - protein, 9 aa, Fusobacterium nucleatum
TTTDSYAGR

SEQ ID NO: 1846 - protein, 8 aa, Fusobacterium nucleatum
ILAEIDEA

SEQ ID NO: 1847 - protein, 10 aa, Fusobacterium nucleatum
DLRSIAKRYK

SEQ ID NO: 1848 - protein, 9 aa, Fusobacterium nucleatum
VIDYKYNAY

SEQ ID NO: 1849 - protein, 10 aa, Fusobacterium nucleatum
GRSALSDSKY

SEQ ID NO: 1850 - protein, 9 aa, Fusobacterium nucleatum
KASAGIYAK

SEQ ID NO: 1851 - protein, 9 aa, Fusobacterium nucleatum
NTIKLKGTK

SEQ ID NO: 1852 - protein, 8 aa, Fusobacterium nucleatum
HYFGIKTL

SEQ ID NO: 1853 - protein, 8 aa, Fusobacterium nucleatum
NPQVNEPL

SEQ ID NO: 1854 - protein, 8 aa, Fusobacterium nucleatum
YSLGLAIL

SEQ ID NO: 1855 - protein, 10 aa, Fusobacterium nucleatum
WQFGMNYFYE

SEQ ID NO: 1856 - protein, 10 aa, Fusobacterium nucleatum
SGATKNVGIY

SEQ ID NO: 1857 - protein, 9 aa, Fusobacterium nucleatum
KEEESVGMY

SEQ ID NO: 1858 - protein, 10 aa, Fusobacterium nucleatum
GATKNVGIYA

SEQ ID NO: 1859 - protein, 10 aa, Fusobacterium nucleatum
TKTLRTSVGV

SEQ ID NO: 1860 - protein, 11 aa, Fusobacterium nucleatum
MDVADGYTGAY

SEQ ID NO: 1861 - protein, 10 aa, Fusobacterium nucleatum
LRDSWSNPSK

SEQ ID NO: 1862 - protein, 8 aa, Fusobacterium nucleatum
STALNNAR

SEQ ID NO: 1863 - protein, 9 aa, Fusobacterium nucleatum
SMTWQEGNF

SEQ ID NO: 1864 - protein, 9 aa, Fusobacterium nucleatum
GIFVRDNGV

SEQ ID NO: 1865 - protein, 9 aa, Fusobacterium nucleatum
NLKPKMVLT

SEQ ID NO: 1866 - protein, 11 aa, Fusobacterium nucleatum
EVAQKASAGIY

SEQ ID NO: 1867 - protein, 10 aa, Fusobacterium nucleatum
NINYTGNMEI

SEQ ID NO: 1868 - protein, 9 aa, Fusobacterium nucleatum
LQKQINSKI

SEQ ID NO: 1869 - protein, 9 aa, Fusobacterium nucleatum
SANNKILNM

SEQ ID NO: 1870 - protein, 11 aa, Fusobacterium nucleatum
SLSGAESIGIY

SEQ ID NO: 1871 - protein, 10 aa, Fusobacterium nucleatum
LAYRHYFGIK

SEQ ID NO: 1872 - protein, 9 aa, Fusobacterium nucleatum
SGAESIGIY

SEQ ID NO: 1873 - protein, 9 aa, Fusobacterium nucleatum
EVGTELAYR

SEQ ID NO: 1874 - protein, 10 aa, Fusobacterium nucleatum
SGDIFVGHNK

SEQ ID NO: 1875 - protein, 9 aa, Fusobacterium nucleatum
AGVLAEKYK

SEQ ID NO: 1876 - protein, 8 aa, Fusobacterium nucleatum
LTPGNDSL

SEQ ID NO: 1877 - protein, 10 aa, Fusobacterium nucleatum
KYNAYGVAYV

SEQ ID NO: 1878 - protein, 10 aa, Fusobacterium nucleatum
QGTAGTPYNI

SEQ ID NO: 1879 - protein, 10 aa, Fusobacterium nucleatum
ADPTKFNNTF

SEQ ID NO: 1880 - protein, 10 aa, Fusobacterium nucleatum
VTAEKGVGIF

SEQ ID NO: 1881 - protein, 10 aa, Fusobacterium nucleatum
FSEEVNTEQM

SEQ ID NO: 1882 - protein, 11 aa, Fusobacterium nucleatum
TGIVHNRFKFK

SEQ ID NO: 1883 - protein, 10 aa, Fusobacterium nucleatum
DIDTHIATTK

SEQ ID NO: 1884 - protein, 11 aa, Fusobacterium nucleatum
ISLNAPSSAGI

SEQ ID NO: 1885 - protein, 11 aa, Fusobacterium nucleatum
VPFDENNSLNW

SEQ ID NO: 1886 - protein, 9 aa, Fusobacterium nucleatum
SAVINSGRI

SEQ ID NO: 1887 - protein, 9 aa, Fusobacterium nucleatum
FLMLGVGAF

SEQ ID NO: 1888 - protein, 8 aa, Fusobacterium nucleatum
SAKINLGK

SEQ ID NO: 1889 - protein, 10 aa, Fusobacterium nucleatum
ISLGDASTGM

SEQ ID NO: 1890 - protein, 10 aa, Fusobacterium nucleatum
TSKTGSAGIY

SEQ ID NO: 1891 - protein, 9 aa, Fusobacterium nucleatum
LTMTTAANI

SEQ ID NO: 1892 - protein, 10 aa, Fusobacterium nucleatum
NLGATQNTML

SEQ ID NO: 1893 - protein, 9 aa, Fusobacterium nucleatum
QIAFGFNNA

SEQ ID NO: 1894 - protein, 10 aa, Fusobacterium nucleatum
VGMYSSSSLK

SEQ ID NO: 1895 - protein, 9 aa, Fusobacterium nucleatum
HGKGINEGK

SEQ ID NO: 1896 - protein, 11 aa, Fusobacterium nucleatum
KLEIETTSNSK

SEQ ID NO: 1897 - protein, 9 aa, Fusobacterium nucleatum
RGKGTWGIS

SEQ ID NO: 1898 - protein, 8 aa, Fusobacterium nucleatum
GMYSSSSL

SEQ ID NO: 1899 - protein, 9 aa, Fusobacterium nucleatum
ISLSGAESI

SEQ ID NO: 1900 - protein, 11 aa, Fusobacterium nucleatum
SLFYATSKAKA

SEQ ID NO: 1901 - protein, 9 aa, Fusobacterium nucleatum
SLEPTIGIY

SEQ ID NO: 1902 - protein, 10 aa, Fusobacterium nucleatum
SLSGAESIGI

SEQ ID NO: 1903 - protein, 11 aa, Fusobacterium nucleatum
IKVGKNSIGIY

SEQ ID NO: 1904 - protein, 10 aa, Fusobacterium nucleatum
RDSKGNVERY

SEQ ID NO: 1905 - protein, 9 aa, Fusobacterium nucleatum
VTSVNDGSI

SEQ ID NO: 1906 - protein, 9 aa, Fusobacterium nucleatum
HIVNEGEIR

SEQ ID NO: 1907 - protein, 9 aa, Fusobacterium nucleatum
KIGEKAVGL

SEQ ID NO: 1908 - protein, 11 aa, Fusobacterium nucleatum
NYFYDHWGSEY

SEQ ID NO: 1909 - protein, 10 aa, Fusobacterium nucleatum
YTLQGTGNGI

SEQ ID NO: 1910 - protein, 10 aa, Fusobacterium nucleatum
GIPNSNVKAL

SEQ ID NO: 1911 - protein, 10 aa, Fusobacterium nucleatum
YRHYFGTKTL

SEQ ID NO: 1912 - protein, 9 aa, Fusobacterium nucleatum
TQETGISNL

SEQ ID NO: 1913 - protein, 9 aa, Fusobacterium nucleatum
ILVTNESAV

SEQ ID NO: 1914 - protein, 10 aa, Fusobacterium nucleatum
SIGIGLLQEI

SEQ ID NO: 1915 - protein, 10 aa, Fusobacterium nucleatum
TLLNETTGKI

SEQ ID NO: 1916 - protein, 10 aa, Fusobacterium nucleatum
YTNADWFNIR

SEQ ID NO: 1917 - protein, 9 aa, Fusobacterium nucleatum
TGLVGVAVM

SEQ ID NO: 1918 - protein, 9 aa, Fusobacterium nucleatum
NTFKIETGK

SEQ ID NO: 1919 - protein, 10 aa, Fusobacterium nucleatum
YGALKVEYGR

SEQ ID NO: 1920 - protein, 11 aa, Fusobacterium nucleatum
RYKSVKYSLGL

SEQ ID NO: 1921 - protein, 10 aa, Fusobacterium nucleatum
GIYSNANNTK

SEQ ID NO: 1922 - protein, 9 aa, Fusobacterium nucleatum
YKYNAYGVA

SEQ ID NO: 1923 - protein, 8 aa, Fusobacterium nucleatum
DEESAGMY

SEQ ID NO: 1924 - protein, 10 aa, Fusobacterium nucleatum
MFAQAEAGKK

SEQ ID NO: 1925 - protein, 9 aa, Fusobacterium nucleatum
YNAYGVAYV

SEQ ID NO: 1926 - protein, 11 aa, Fusobacterium nucleatum
LIQLMEQGDQV

SEQ ID NO: 1927 - protein, 9 aa, Fusobacterium nucleatum
AEGIKNHGM

SEQ ID NO: 1928 - protein, 10 aa, Fusobacterium nucleatum
RSNPSDKDKY

SEQ ID NO: 1929 - protein, 10 aa, Fusobacterium nucleatum
IYGFYNKDTR

SEQ ID NO: 1930 - protein, 9 aa, Fusobacterium nucleatum
NRSWGLVDL

SEQ ID NO: 1931 - protein, 10 aa, Fusobacterium nucleatum
TASAKINLGK

SEQ ID NO: 1932 - protein, 10 aa, Fusobacterium nucleatum
KVEYGRVSKI

SEQ ID NO: 1933 - protein, 8 aa, Fusobacterium nucleatum
LMLGVGAF

SEQ ID NO: 1934 - protein, 11 aa, Fusobacterium nucleatum
NSSNGTTIGIY

SEQ ID NO: 1935 - protein, 11 aa, Fusobacterium nucleatum
GMYSSSSLKAT

SEQ ID NO: 1936 - protein, 9 aa, Fusobacterium nucleatum
NNSNHLIAF

SEQ ID NO: 1937 - protein, 9 aa, Fusobacterium nucleatum
FKIESGKTL

SEQ ID NO: 1938 - protein, 10 aa, Fusobacterium nucleatum
TNGIIVSAKK

SEQ ID NO: 1939 - protein, 8 aa, Fusobacterium nucleatum
FEAVNHGI

SEQ ID NO: 1940 - protein, 8 aa, Fusobacterium nucleatum
VEEAVGVF

SEQ ID NO: 1941 - protein, 11 aa, Fusobacterium nucleatum
GISWKDVSQAY

SEQ ID NO: 1942 - protein, 10 aa, Fusobacterium nucleatum
NGTINFSTGK

SEQ ID NO: 1943 - protein, 8 aa, Fusobacterium nucleatum
LSDIGFYV

SEQ ID NO: 1944 - protein, 11 aa, Fusobacterium nucleatum
GLLQEIQEVKL

SEQ ID NO: 1945 - protein, 8 aa, Fusobacterium nucleatum
QLIIGTEY

SEQ ID NO: 1946 - protein, 10 aa, Fusobacterium nucleatum
LSEGFSIRPY

SEQ ID NO: 1947 - protein, 9 aa, Fusobacterium nucleatum
YYTYGIGVK

SEQ ID NO: 1948 - protein, 9 aa, Fusobacterium nucleatum
VRGGVGLRV

SEQ ID NO: 1949 - protein, 9 aa, Fusobacterium nucleatum
RKFLVVDEI

SEQ ID NO: 1950 - protein, 9 aa, Fusobacterium nucleatum
FAQAEAGKK

SEQ ID NO: 1951 - protein, 9 aa, Fusobacterium nucleatum
ISGDIFVGR

SEQ ID NO: 1952 - protein, 11 aa, Fusobacterium nucleatum
KINDARSENEK

SEQ ID NO: 1953 - protein, 10 aa, Fusobacterium nucleatum
RVLPGGEIGR

SEQ ID NO: 1954 - protein, 11 aa, Fusobacterium nucleatum
RVQATGNILDK

SEQ ID NO: 1955 - protein, 9 aa, Fusobacterium nucleatum
LTTDSKITV

SEQ ID NO: 1956 - protein, 9 aa, Fusobacterium nucleatum
MTNEGSAAM

SEQ ID NO: 1957 - protein, 10 aa, Fusobacterium nucleatum
SEGFSIRPYG

SEQ ID NO: 1958 - protein, 9 aa, Fusobacterium nucleatum
KVNQNRVAY

SEQ ID NO: 1959 - protein, 11 aa, Fusobacterium nucleatum
HVKDQGIGIYK

SEQ ID NO: 1960 - protein, 9 aa, Fusobacterium nucleatum
SISSVSKNV

SEQ ID NO: 1961 - protein, 10 aa, Fusobacterium nucleatum
FEPAIGIYTA

SEQ ID NO: 1962 - protein, 9 aa, Fusobacterium nucleatum
SSWQFGMNY

SEQ ID NO: 1963 - protein, 10 aa, Fusobacterium nucleatum
SGDIFVGYNK

SEQ ID NO: 1964 - protein, 10 aa, Fusobacterium nucleatum
RAKNDGTIKV

SEQ ID NO: 1965 - protein, 9 aa, Fusobacterium nucleatum
DAISTAVLV

SEQ ID NO: 1966 - protein, 11 aa, Fusobacterium nucleatum
DYKYNAYGVAY

SEQ ID NO: 1967 - protein, 10 aa, Fusobacterium nucleatum
IQLMEQGNQV

SEQ ID NO: 1968 - protein, 9 aa, Fusobacterium nucleatum
GTNGIIVSA

SEQ ID NO: 1969 - protein, 10 aa, Fusobacterium nucleatum
AESGVGIFVR

SEQ ID NO: 1970 - protein, 8 aa, Fusobacterium nucleatum
LERKFLVV

SEQ ID NO: 1971 - protein, 9 aa, Fusobacterium nucleatum
RSALSDSKY

SEQ ID NO: 1972 - protein, 9 aa, Fusobacterium nucleatum
GAKSYGFIL

SEQ ID NO: 1973 - protein, 9 aa, Fusobacterium nucleatum
TEYSTGMYG

SEQ ID NO: 1974 - protein, 10 aa, Fusobacterium nucleatum
TLTNQNSIVV

SEQ ID NO: 1975 - protein, 9 aa, Fusobacterium nucleatum
EIVSSKENL

SEQ ID NO: 1976 - protein, 10 aa, Fusobacterium nucleatum
WNFADGLEQR

SEQ ID NO: 1977 - protein, 9 aa, Fusobacterium nucleatum
FGIVTVFNK

SEQ ID NO: 1978 - protein, 11 aa, Fusobacterium nucleatum
GEIRIYNNKSI

SEQ ID NO: 1979 - protein, 9 aa, Fusobacterium nucleatum
FLKDANFVS

SEQ ID NO: 1980 - protein, 11 aa, Fusobacterium nucleatum
AENTNLTTNSK

SEQ ID NO: 1981 - protein, 9 aa, Fusobacterium nucleatum
GNNLYKVEK

SEQ ID NO: 1982 - protein, 10 aa, Fusobacterium nucleatum
YNKMHRKFLV

SEQ ID NO: 1983 - protein, 10 aa, Fusobacterium nucleatum
YSLGLAILFL

SEQ ID NO: 1984 - protein, 9 aa, Fusobacterium nucleatum
EYGRVSKIR

SEQ ID NO: 1985 - protein, 11 aa, Fusobacterium nucleatum
VGMYSSSSLKA

SEQ ID NO: 1986 - protein, 9 aa, Fusobacterium nucleatum
SLNITEPTV

SEQ ID NO: 1987 - protein, 10 aa, Fusobacterium nucleatum
TAMFINSARG

SEQ ID NO: 1988 - protein, 9 aa, Fusobacterium nucleatum
LNVGIDNQR

SEQ ID NO: 1989 - protein, 10 aa, Fusobacterium nucleatum
GMLGEDSGTV

SEQ ID NO: 1990 - protein, 10 aa, Fusobacterium nucleatum
NNTFKIETGK

SEQ ID NO: 1991 - protein, 9 aa, Fusobacterium nucleatum
FEAVNHGII

SEQ ID NO: 1992 - protein, 8 aa, Fusobacterium nucleatum
DMFVGYNK

SEQ ID NO: 1993 - protein, 11 aa, Fusobacterium nucleatum
ATDKIQSMTGV

SEQ ID NO: 1994 - protein, 9 aa, Fusobacterium nucleatum
ALKVEYGRV

SEQ ID NO: 1995 - protein, 9 aa, Fusobacterium nucleatum
PEVGTELAY

SEQ ID NO: 1996 - protein, 9 aa, Fusobacterium nucleatum
IPTTVNVTA

SEQ ID NO: 1997 - protein, 10 aa, Fusobacterium nucleatum
KGSDVDVSHW

SEQ ID NO: 1998 - protein, 10 aa, Fusobacterium nucleatum
VTMGNDSVFL

SEQ ID NO: 1999 - protein, 10 aa, Fusobacterium nucleatum
ALNNARIVAT

SEQ ID NO: 2000 - protein, 11 aa, Fusobacterium nucleatum
ADAQGTAGTPY

SEQ ID NO: 2001 - protein, 9 aa, Fusobacterium nucleatum
DSNGSSAVY

SEQ ID NO: 2002 - protein, 10 aa, Fusobacterium nucleatum
SKIKEKSGEM

SEQ ID NO: 2003 - protein, 8 aa, Fusobacterium nucleatum
TSTGTISL

SEQ ID NO: 2004 - protein, 11 aa, Fusobacterium nucleatum
TTKDSEPTGVY

SEQ ID NO: 2005 - protein, 8 aa, Fusobacterium nucleatum
RVSKIKEK

SEQ ID NO: 2006 - protein, 10 aa, Fusobacterium nucleatum
MYAKNDASNI

SEQ ID NO: 2007 - protein, 10 aa, Fusobacterium nucleatum
AGKATTVTNK

SEQ ID NO: 2008 - protein, 9 aa, Fusobacterium nucleatum
TTSNSKISL

SEQ ID NO: 2009 - protein, 11 aa, Fusobacterium nucleatum
VTMGNDSVFLY

SEQ ID NO: 2010 - protein, 8 aa, Fusobacterium nucleatum
VAMAKLPY

SEQ ID NO: 2011 - protein, 10 aa, Fusobacterium nucleatum
IYTAEGSSNI

SEQ ID NO: 2012 - protein, 9 aa, Fusobacterium nucleatum
SNKVKTFGM

SEQ ID NO: 2013 - protein, 8 aa, Fusobacterium nucleatum
GEIKVDAA

SEQ ID NO: 2014 - protein, 9 aa, Fusobacterium nucleatum
IPDSEVEKI

SEQ ID NO: 2015 - protein, 10 aa, Fusobacterium nucleatum
TQNTMLYLKN

SEQ ID NO: 2016 - protein, 9 aa, Fusobacterium nucleatum
SLGLAILFL

SEQ ID NO: 2017 - protein, 9 aa, Fusobacterium nucleatum
TKDKARGIL

SEQ ID NO: 2018 - protein, 9 aa, Fusobacterium nucleatum
LDKEFTHLR

SEQ ID NO: 2019 - protein, 10 aa, Fusobacterium nucleatum
DPTKFNNTFK

SEQ ID NO: 2020 - protein, 9 aa, Fusobacterium nucleatum
ISLENKESV

SEQ ID NO: 2021 - protein, 10 aa, Fusobacterium nucleatum
YSKGQSNTVR

SEQ ID NO: 2022 - protein, 11 aa, Fusobacterium nucleatum
NTGKIYLDGSR

SEQ ID NO: 2023 - protein, 11 aa, Fusobacterium nucleatum
YNNTNTGTVTM

SEQ ID NO: 2024 - protein, 9 aa, Fusobacterium nucleatum
VSNGSSAVY

SEQ ID NO: 2025 - protein, 11 aa, Fusobacterium nucleatum
TLNGKKATGIF

SEQ ID NO: 2026 - protein, 11 aa, Fusobacterium nucleatum
GIFGEDNSTLL

SEQ ID NO: 2027 - protein, 10 aa, Fusobacterium nucleatum
VNTKKSVGIY

SEQ ID NO: 2028 - protein, 10 aa, Fusobacterium nucleatum
ITGSPSVAMY

SEQ ID NO: 2029 - protein, 8 aa, Fusobacterium nucleatum
TMGRVLMK

SEQ ID NO: 2030 - protein, 10 aa, Fusobacterium nucleatum
KLKRSGDITA

SEQ ID NO: 2031 - protein, 8 aa, Fusobacterium nucleatum
IYKESGKL

SEQ ID NO: 2032 - protein, 10 aa, Fusobacterium nucleatum
SEEGRVYINA

SEQ ID NO: 2033 - protein, 9 aa, Fusobacterium nucleatum
NAMDVAENQ

SEQ ID NO: 2034 - protein, 11 aa, Fusobacterium nucleatum
GRVYVGKTDDI

SEQ ID NO: 2035 - protein, 11 aa, Fusobacterium nucleatum
SNIQGVGVYAK

SEQ ID NO: 2036 - protein, 11 aa, Fusobacterium nucleatum
HVKDQGVGIYK

SEQ ID NO: 2037 - protein, 8 aa, Fusobacterium nucleatum
AENGVGIF

SEQ ID NO: 2038 - protein, 11 aa, Fusobacterium nucleatum
SIATNEDTINV

SEQ ID NO: 2039 - protein, 9 aa, Fusobacterium nucleatum
KVRGKGTWG

SEQ ID NO: 2040 - protein, 9 aa, Fusobacterium nucleatum
KTFGMKGEY

SEQ ID NO: 2041 - protein, 9 aa, Fusobacterium nucleatum
GVYVKLDKA

SEQ ID NO: 2042 - protein, 8 aa, Fusobacterium nucleatum
YENELGRV

SEQ ID NO: 2043 - protein, 10 aa, Fusobacterium nucleatum
FNAKSKYYTY

SEQ ID NO: 2044 - protein, 10 aa, Fusobacterium nucleatum
NVNSKSSVGM

SEQ ID NO: 2045 - protein, 9 aa, Fusobacterium nucleatum
RIFNKLNSI

SEQ ID NO: 2046 - protein, 10 aa, Fusobacterium nucleatum
RYDMNALDSV

SEQ ID NO: 2047 - protein, 9 aa, Fusobacterium nucleatum
KQLQAKVGL

SEQ ID NO: 2048 - protein, 10 aa, Fusobacterium nucleatum
IALGNGSVGL

SEQ ID NO: 2049 - protein, 10 aa, Fusobacterium nucleatum
GLYSKGQSNT

SEQ ID NO: 2050 - protein, 11 aa, Fusobacterium nucleatum
ALSDSKYTSGV

SEQ ID NO: 2051 - protein, 9 aa, Fusobacterium nucleatum
ENVTGLVGV

SEQ ID NO: 2052 - protein, 10 aa, Fusobacterium nucleatum
DSNINYTGNM

SEQ ID NO: 2053 - protein, 8 aa, Fusobacterium nucleatum
KEVTKQAI

SEQ ID NO: 2054 - protein, 9 aa, Fusobacterium nucleatum
DTLGRTKPI

SEQ ID NO: 2055 - protein, 9 aa, Fusobacterium nucleatum
LIRGKRDSK

SEQ ID NO: 2056 - protein, 10 aa, Fusobacterium nucleatum
SLGDASTGMY

SEQ ID NO: 2057 - protein, 11 aa, Fusobacterium nucleatum
KGLRLELIQLM

SEQ ID NO: 2058 - protein, 11 aa, Fusobacterium nucleatum
GLAILFLMLGV

SEQ ID NO: 2059 - protein, 11 aa, Fusobacterium nucleatum
GMAADNGGHIV

SEQ ID NO: 2060 - protein, 10 aa, Fusobacterium nucleatum
EGEIRIYNNK

SEQ ID NO: 2061 - protein, 10 aa, Fusobacterium nucleatum
NGNITINQKK

SEQ ID NO: 2062 - protein, 10 aa, Fusobacterium nucleatum
TVQTLEAPDV

SEQ ID NO: 2063 - protein, 11 aa, Fusobacterium nucleatum
VSFGEGASLFY

SEQ ID NO: 2064 - protein, 8 aa, Fusobacterium nucleatum
VYAEDSNM

SEQ ID NO: 2065 - protein, 9 aa, Fusobacterium nucleatum
SIAGSLTWI

SEQ ID NO: 2066 - protein, 9 aa, Fusobacterium nucleatum
LENSNSITT

SEQ ID NO: 2067 - protein, 9 aa, Fusobacterium nucleatum
IFIKDEKSV

SEQ ID NO: 2068 - protein, 9 aa, Fusobacterium nucleatum
GENTSTGTI

SEQ ID NO: 2069 - protein, 11 aa, Fusobacterium nucleatum
WTISGDIFVGR

SEQ ID NO: 2070 - protein, 10 aa, Fusobacterium nucleatum
ANIALGNGSV

SEQ ID NO: 2071 - protein, 11 aa, Fusobacterium nucleatum
VTNGDAISTAV

SEQ ID NO: 2072 - protein, 8 aa, Fusobacterium nucleatum
NEKNIGIL

SEQ ID NO: 2073 - protein, 9 aa, Fusobacterium nucleatum
KSSVGMLAK

SEQ ID NO: 2074 - protein, 9 aa, Fusobacterium nucleatum
GIYSKINSS

SEQ ID NO: 2075 - protein, 10 aa, Fusobacterium nucleatum
RGNWKVRNAM

SEQ ID NO: 2076 - protein, 10 aa, Fusobacterium nucleatum
TISGDIFVGR

SEQ ID NO: 2077 - protein, 9 aa, Fusobacterium nucleatum
DKMTGSPSV

SEQ ID NO: 2078 - protein, 9 aa, Fusobacterium nucleatum
LAENGVGIF

SEQ ID NO: 2079 - protein, 9 aa, Fusobacterium nucleatum
NQKKSVGIY

SEQ ID NO: 2080 - protein, 10 aa, Fusobacterium nucleatum
ILADKATGIN

SEQ ID NO: 2081 - protein, 11 aa, Fusobacterium nucleatum
LSIKPEVGTEL

SEQ ID NO: 2082 - protein, 10 aa, Fusobacterium nucleatum
TWQEGNFEAV

SEQ ID NO: 2083 - protein, 11 aa, Fusobacterium nucleatum
ATNKGTVTTEK

SEQ ID NO: 2084 - protein, 10 aa, Fusobacterium nucleatum
QITGVAMAKL

SEQ ID NO: 2085 - protein, 9 aa, Fusobacterium nucleatum
SANSFEPAI

SEQ ID NO: 2086 - protein, 9 aa, Fusobacterium nucleatum
VLPGGEIGR

SEQ ID NO: 2087 - protein, 9 aa, Fusobacterium nucleatum
LGVTGNVGY

SEQ ID NO: 2088 - protein, 11 aa, Fusobacterium nucleatum
TQSEVTNSGLV

SEQ ID NO: 2089 - protein, 9 aa, Fusobacterium nucleatum
NAKSKYYTY

SEQ ID NO: 2090 - protein, 11 aa, Fusobacterium nucleatum
LNAPSSAGIQL

SEQ ID NO: 2091 - protein, 11 aa, Fusobacterium nucleatum
GMFAQAEAGKK

SEQ ID NO: 2092 - protein, 10 aa, Fusobacterium nucleatum
GTATIELEGK

SEQ ID NO: 2093 - protein, 11 aa, Fusobacterium nucleatum
NSYGVLIRGKR

SEQ ID NO: 2094 - protein, 10 aa, Fusobacterium nucleatum
TNTSGGVITL

SEQ ID NO: 2095 - protein, 9 aa, Fusobacterium nucleatum
GQDSTGLFL

SEQ ID NO: 2096 - protein, 10 aa, Fusobacterium nucleatum
STNGNRSWGL

SEQ ID NO: 2097 - protein, 9 aa, Fusobacterium nucleatum
DQIQGRNFK

SEQ ID NO: 2098 - protein, 9 aa, Fusobacterium nucleatum
RHYFGIKTL

SEQ ID NO: 2099 - protein, 11 aa, Fusobacterium nucleatum
VTAESGVGIFV

SEQ ID NO: 2100 - protein, 10 aa, Fusobacterium nucleatum
NKEASVGIYA

SEQ ID NO: 2101 - protein, 11 aa, Fusobacterium nucleatum
YNFTDGLEQRY

SEQ ID NO: 2102 - protein, 10 aa, Fusobacterium nucleatum
AQLDGAGTKV

SEQ ID NO: 2103 - protein, 9 aa, Fusobacterium nucleatum
LGSNTIKLK

SEQ ID NO: 2104 - protein, 11 aa, Fusobacterium nucleatum
AKVGLFKSVPF

SEQ ID NO: 2105 - protein, 8 aa, Fusobacterium nucleatum
KESVGMYA

SEQ ID NO: 2106 - protein, 10 aa, Fusobacterium nucleatum
EMMGHQYANV

SEQ ID NO: 2107 - protein, 9 aa, Fusobacterium nucleatum
FGKNSSTLL

SEQ ID NO: 2108 - protein, 11 aa, Fusobacterium nucleatum
KEKQLQAKVGL

SEQ ID NO: 2109 - protein, 10 aa, Fusobacterium nucleatum
MGNNLYKVEK

SEQ ID NO: 2110 - protein, 10 aa, Fusobacterium nucleatum
INLGTVNQNR

SEQ ID NO: 2111 - protein, 8 aa, Fusobacterium nucleatum
YNAYGVAY

SEQ ID NO: 2112 - protein, 9 aa, Fusobacterium nucleatum
DSALAGANI

SEQ ID NO: 2113 - protein, 9 aa, Fusobacterium nucleatum
APSAPTAPN

SEQ ID NO: 2114 - protein, 9 aa, Fusobacterium nucleatum
AYIEGNSAL

SEQ ID NO: 2115 - protein, 9 aa, Fusobacterium nucleatum
GNWKVRNAM

SEQ ID NO: 2116 - protein, 10 aa, Fusobacterium nucleatum
EAVNHGTIDF

SEQ ID NO: 2117 - protein, 9 aa, Fusobacterium nucleatum
VINGETSIV

SEQ ID NO: 2118 - protein, 9 aa, Fusobacterium nucleatum
RYKSVKYSL

SEQ ID NO: 2119 - protein, 10 aa, Fusobacterium nucleatum
GIYSDGDTKV

SEQ ID NO: 2120 - protein, 11 aa, Fusobacterium nucleatum
FNNTFEIETGK

SEQ ID NO: 2121 - protein, 9 aa, Fusobacterium nucleatum
EMSAGMYVK

SEQ ID NO: 2122 - protein, 9 aa, Fusobacterium nucleatum
SQLTNEGNI

SEQ ID NO: 2123 - protein, 11 aa, Fusobacterium nucleatum
ATQNTMLYLKN

SEQ ID NO: 2124 - protein, 9 aa, Fusobacterium nucleatum
NLKNSVGGL

SEQ ID NO: 2125 - protein, 10 aa, Fusobacterium nucleatum
NKTMGRVLMK

SEQ ID NO: 2126 - protein, 11 aa, Fusobacterium nucleatum
LYSKGQSYTVR

SEQ ID NO: 2127 - protein, 8 aa, Fusobacterium nucleatum
MSAGMYVK

SEQ ID NO: 2128 - protein, 11 aa, Fusobacterium nucleatum
ASKISIGAKSY

SEQ ID NO: 2129 - protein, 10 aa, Fusobacterium nucleatum
EIFNAKSKYY

SEQ ID NO: 2130 - protein, 10 aa, Fusobacterium nucleatum
GMYGKGIGTT

SEQ ID NO: 2131 - protein, 9 aa, Fusobacterium nucleatum
TGIVHNTFK

SEQ ID NO: 2132 - protein, 8 aa, Fusobacterium nucleatum
KSKYYTYG

SEQ ID NO: 2133 - protein, 9 aa, Fusobacterium nucleatum
KHTSGTIEV

SEQ ID NO: 2134 - protein, 9 aa, Fusobacterium nucleatum
IMVVNESTA

SEQ ID NO: 2135 - protein, 9 aa, Fusobacterium nucleatum
TAEKGVGIF

SEQ ID NO: 2136 - protein, 11 aa, Fusobacterium nucleatum
KLGQDSTGLFL

SEQ ID NO: 2137 - protein, 9 aa, Fusobacterium nucleatum
GILAEIDEA

SEQ ID NO: 2138 - protein, 10 aa, Fusobacterium nucleatum
NSNVEMNGGK

SEQ ID NO: 2139 - protein, 10 aa, Fusobacterium nucleatum
ATNLVGTETV

SEQ ID NO: 2140 - protein, 9 aa, Fusobacterium nucleatum
ANFSNKGVL

SEQ ID NO: 2141 - protein, 8 aa, Fusobacterium nucleatum
KVYSDVSK

SEQ ID NO: 2142 - protein, 10 aa, Fusobacterium nucleatum
NSTADNNDTI

SEQ ID NO: 2143 - protein, 9 aa, Fusobacterium nucleatum
ATNKKTITA

SEQ ID NO: 2144 - protein, 9 aa, Fusobacterium nucleatum
NFTNTGNIY

SEQ ID NO: 2145 - protein, 9 aa, Fusobacterium nucleatum
IGHNKLERK

SEQ ID NO: 2146 - protein, 9 aa, Fusobacterium nucleatum
LAYKHYFGA

SEQ ID NO: 2147 - protein, 11 aa, Fusobacterium nucleatum
KTVTNSPLLSK

SEQ ID NO: 2148 - protein, 10 aa, Fusobacterium nucleatum
RNFKLTSIAG

SEQ ID NO: 2149 - protein, 8 aa, Fusobacterium nucleatum
LPYTSFVK

SEQ ID NO: 2150 - protein, 8 aa, Fusobacterium nucleatum
NSYGVIIR

SEQ ID NO: 2151 - protein, 10 aa, Fusobacterium nucleatum
KIGEKAVGLY

SEQ ID NO: 2152 - protein, 10 aa, Fusobacterium nucleatum
SSDPEGQELR

SEQ ID NO: 2153 - protein, 11 aa, Fusobacterium nucleatum
ELAYRHYFGTK

SEQ ID NO: 2154 - protein, 9 aa, Fusobacterium nucleatum
YATSKAKAI

SEQ ID NO: 2155 - protein, 9 aa, Fusobacterium nucleatum
KHYFGTKTL

SEQ ID NO: 2156 - protein, 9 aa, Fusobacterium nucleatum
ESDVTNSGK

SEQ ID NO: 2157 - protein, 10 aa, Fusobacterium nucleatum
IQSYTKGIKV

SEQ ID NO: 2158 - protein, 8 aa, Fusobacterium nucleatum
KENDYLSI

SEQ ID NO: 2159 - protein, 10 aa, Fusobacterium nucleatum
TITGTKDKAR

SEQ ID NO: 2160 - protein, 11 aa, Fusobacterium nucleatum
YTRGNWKVRNA

SEQ ID NO: 2161 - protein, 10 aa, Fusobacterium nucleatum
AYENELGRVA

SEQ ID NO: 2162 - protein, 10 aa, Fusobacterium nucleatum
IDLNSGATNK

SEQ ID NO: 2163 - protein, 10 aa, Fusobacterium nucleatum
IENTGNIEVA

SEQ ID NO: 2164 - protein, 9 aa, Fusobacterium nucleatum
TVRNSVTNT

SEQ ID NO: 2165 - protein, 9 aa, Fusobacterium nucleatum
RLEVKHNDY

SEQ ID NO: 2166 - protein, 10 aa, Fusobacterium nucleatum
RVAGTTADWF

SEQ ID NO: 2167 - protein, 10 aa, Fusobacterium nucleatum
KDSALAGANI

SEQ ID NO: 2168 - protein, 10 aa, Fusobacterium nucleatum
GELDIDTHIA

SEQ ID NO: 2169 - protein, 11 aa, Fusobacterium nucleatum
YTGIVHNTFKF

SEQ ID NO: 2170 - protein, 9 aa, Fusobacterium nucleatum
QLMEQGNQV

SEQ ID NO: 2171 - protein, 10 aa, Fusobacterium nucleatum
FLVVDEIFNA

SEQ ID NO: 2172 - protein, 10 aa, Fusobacterium nucleatum
LVVDEIFNAK

SEQ ID NO: 2173 - protein, 10 aa, Fusobacterium nucleatum
DINLNGSGSF

SEQ ID NO: 2174 - protein, 8 aa, Fusobacterium nucleatum
AYIEGNSI

SEQ ID NO: 2175 - protein, 8 aa, Fusobacterium nucleatum
TTATNIAL

SEQ ID NO: 2176 - protein, 11 aa, Fusobacterium nucleatum
KISSDPEGQEL

SEQ ID NO: 2177 - protein, 11 aa, Fusobacterium nucleatum
LGMSDIGFYVD

SEQ ID NO: 2178 - protein, 11 aa, Fusobacterium nucleatum
IALGNGSVGLY

SEQ ID NO: 2179 - protein, 9 aa, Fusobacterium nucleatum
MSGSPSVAM

SEQ ID NO: 2180 - protein, 10 aa, Fusobacterium nucleatum
VGMYATNANV

SEQ ID NO: 2181 - protein, 11 aa, Fusobacterium nucleatum
LTIENTGNIEV

SEQ ID NO: 2182 - protein, 10 aa, Fusobacterium nucleatum
YLSIRPEIGT

SEQ ID NO: 2183 - protein, 8 aa, Fusobacterium nucleatum
SSLKATNK

SEQ ID NO: 2184 - protein, 10 aa, Fusobacterium nucleatum
KSVKYSLGLA

SEQ ID NO: 2185 - protein, 11 aa, Fusobacterium nucleatum
STQNTMLYLKN

SEQ ID NO: 2186 - protein, 10 aa, Fusobacterium nucleatum
NVTGLAGVAV

SEQ ID NO: 2187 - protein, 10 aa, Fusobacterium nucleatum
SIRPEIGTEL

SEQ ID NO: 2188 - protein, 11 aa, Fusobacterium nucleatum
NISKVGTITLK

SEQ ID NO: 2189 - protein, 9 aa, Fusobacterium nucleatum
MNGGKIHVK

SEQ ID NO: 2190 - protein, 10 aa, Fusobacterium nucleatum
SSSSLKATNK

SEQ ID NO: 2191 - protein, 9 aa, Fusobacterium nucleatum
SVAENKGTL

SEQ ID NO: 2192 - protein, 8 aa, Fusobacterium nucleatum
GMSDIGFY

SEQ ID NO: 2193 - protein, 10 aa, Fusobacterium nucleatum
AEKKKSAGML

SEQ ID NO: 2194 - protein, 10 aa, Fusobacterium nucleatum
EFRLSEGFSI

SEQ ID NO: 2195 - protein, 11 aa, Fusobacterium nucleatum
KFISHLGNLGA

SEQ ID NO: 2196 - protein, 10 aa, Fusobacterium nucleatum
FGIKTLRTSL

SEQ ID NO: 2197 - protein, 9 aa, Fusobacterium nucleatum
WTISGDMFV

SEQ ID NO: 2198 - protein, 9 aa, Fusobacterium nucleatum
SLFYATSKA

SEQ ID NO: 2199 - protein, 9 aa, Fusobacterium nucleatum
REKSGEVKL

SEQ ID NO: 2200 - protein, 10 aa, Fusobacterium nucleatum
LENSKFISHL

SEQ ID NO: 2201 - protein, 11 aa, Fusobacterium nucleatum
SEGKLENSNSI

SEQ ID NO: 2202 - protein, 11 aa, Fusobacterium nucleatum
GENTSTGTITL

SEQ ID NO: 2203 - protein, 9 aa, Fusobacterium nucleatum
GRVANGKNK

SEQ ID NO: 2204 - protein, 9 aa, Fusobacterium nucleatum
TTAGTGIFI

SEQ ID NO: 2205 - protein, 10 aa, Fusobacterium nucleatum
KLEVKENDYL

SEQ ID NO: 2206 - protein, 9 aa, Fusobacterium nucleatum
RVLMKADNR

SEQ ID NO: 2207 - protein, 10 aa, Fusobacterium nucleatum
KDYEGVTITV

SEQ ID NO: 2208 - protein, 11 aa, Fusobacterium nucleatum
ILAEKKKSAGM

SEQ ID NO: 2209 - protein, 10 aa, Fusobacterium nucleatum
YTAEGASTIK

SEQ ID NO: 2210 - protein, 10 aa, Fusobacterium nucleatum
NTKNSAGIMV

SEQ ID NO: 2211 - protein, 11 aa, Fusobacterium nucleatum
HGIIDFSAAEK

SEQ ID NO: 2212 - protein, 9 aa, Fusobacterium nucleatum
NPSKDSNKV

SEQ ID NO: 2213 - protein, 11 aa, Fusobacterium nucleatum
NLGSTQNTMLY

SEQ ID NO: 2214 - protein, 11 aa, Fusobacterium nucleatum
TGLFLKDANFV

SEQ ID NO: 2215 - protein, 10 aa, Fusobacterium nucleatum
KSKITNTGTG

SEQ ID NO: 2216 - protein, 9 aa, Fusobacterium nucleatum
KVAYTNADW

SEQ ID NO: 2217 - protein, 11 aa, Fusobacterium nucleatum
GILGSKGSNLK

SEQ ID NO: 2218 - protein, 9 aa, Fusobacterium nucleatum
YKTDTAGVI

SEQ ID NO: 2219 - protein, 9 aa, Fusobacterium nucleatum
YSSSSLKAT

SEQ ID NO: 2220 - protein, 9 aa, Fusobacterium nucleatum
LNIGLDNQR

SEQ ID NO: 2221 - protein, 9 aa, Fusobacterium nucleatum
AAEKSTAMF

SEQ ID NO: 2222 - protein, 10 aa, Fusobacterium nucleatum
LANSSNGTTI

SEQ ID NO: 2223 - protein, 10 aa, Fusobacterium nucleatum
LDGNGNIGIY

SEQ ID NO: 2224 - protein, 8 aa, Fusobacterium nucleatum
KENIGLMA

SEQ ID NO: 2225 - protein, 10 aa, Fusobacterium nucleatum
YTDVSKIVYG

SEQ ID NO: 2226 - protein, 8 aa, Fusobacterium nucleatum
AYLENSKF

SEQ ID NO: 2227 - protein, 10 aa, Fusobacterium nucleatum
NVQTKLNVLR

SEQ ID NO: 2228 - protein, 11 aa, Fusobacterium nucleatum
NNGTINFSTGK

SEQ ID NO: 2229 - protein, 9 aa, Fusobacterium nucleatum
GTVGFTSVA

SEQ ID NO: 2230 - protein, 10 aa, Fusobacterium nucleatum
KNTKDININT

SEQ ID NO: 2231 - protein, 11 aa, Fusobacterium nucleatum
KNKARVAGTTA

SEQ ID NO: 2232 - protein, 11 aa, Fusobacterium nucleatum
VFNKGVPKNLF

SEQ ID NO: 2233 - protein, 9 aa, Fusobacterium nucleatum
YAVNGQDSI

SEQ ID NO: 2234 - protein, 9 aa, Fusobacterium nucleatum
VKNNKTISV

SEQ ID NO: 2235 - protein, 9 aa, Fusobacterium nucleatum
VSAKKSAGI

SEQ ID NO: 2236 - protein, 9 aa, Fusobacterium nucleatum
LLNETTGKI

SEQ ID NO: 2237 - protein, 9 aa, Fusobacterium nucleatum
KIQSMTGVY

SEQ ID NO: 2238 - protein, 9 aa, Fusobacterium nucleatum
EEMSAGMYV

SEQ ID NO: 2239 - protein, 10 aa, Fusobacterium nucleatum
RVAYYVNGKD

SEQ ID NO: 2240 - protein, 8 aa, Fusobacterium nucleatum
KSVGIYSK

SEQ ID NO: 2241 - protein, 11 aa, Fusobacterium nucleatum
IKTFGMKGEYK

SEQ ID NO: 2242 - protein, 10 aa, Fusobacterium nucleatum
GKITGYGVGV

SEQ ID NO: 2243 - protein, 11 aa, Fusobacterium nucleatum
VGLYSADPTKF

SEQ ID NO: 2244 - protein, 8 aa, Fusobacterium nucleatum
YTYGIGVK

SEQ ID NO: 2245 - protein, 9 aa, Fusobacterium nucleatum
YKQNGKATI

SEQ ID NO: 2246 - protein, 9 aa, Fusobacterium nucleatum
NTSKLDYTL

SEQ ID NO: 2247 - protein, 10 aa, Fusobacterium nucleatum
GASIFYATLK

SEQ ID NO: 2248 - protein, 11 aa, Fusobacterium nucleatum
FSAAEKSTAMF

SEQ ID NO: 2249 - protein, 10 aa, Fusobacterium nucleatum
IYAPKSNISK

SEQ ID NO: 2250 - protein, 10 aa, Fusobacterium nucleatum
GTEYSEKTNK

SEQ ID NO: 2251 - protein, 8 aa, Fusobacterium nucleatum
QRYDMNAL

SEQ ID NO: 2252 - protein, 10 aa, Fusobacterium nucleatum
TGKVYTDVSK

SEQ ID NO: 2253 - protein, 11 aa, Fusobacterium nucleatum
ANVEIASGKTL

SEQ ID NO: 2254 - protein, 11 aa, Fusobacterium nucleatum
YRHYFGTKTLR

SEQ ID NO: 2255 - protein, 10 aa, Fusobacterium nucleatum
IRTTDSYAGR

SEQ ID NO: 2256 - protein, 11 aa, Fusobacterium nucleatum
STGMYLTNAEK

SEQ ID NO: 2257 - protein, 9 aa, Fusobacterium nucleatum
TTSEIIVNK

SEQ ID NO: 2258 - protein, 9 aa, Fusobacterium nucleatum
VTNSGTIDI

SEQ ID NO: 2259 - protein, 9 aa, Fusobacterium nucleatum
VTAEKGVGI

SEQ ID NO: 2260 - protein, 11 aa, Fusobacterium nucleatum
KPTFLRNGVPI

SEQ ID NO: 2261 - protein, 10 aa, Fusobacterium nucleatum
KIREKSGEVK

SEQ ID NO: 2262 - protein, 9 aa, Fusobacterium nucleatum
QATGIVLDK

SEQ ID NO: 2263 - protein, 9 aa, Fusobacterium nucleatum
RTKPIDIDG

SEQ ID NO: 2264 - protein, 9 aa, Fusobacterium nucleatum
ENVTGLAGV

SEQ ID NO: 2265 - protein, 10 aa, Fusobacterium nucleatum
LTLTNQNSIV

SEQ ID NO: 2266 - protein, 9 aa, Fusobacterium nucleatum
SEIINSGII

SEQ ID NO: 2267 - protein, 11 aa, Fusobacterium nucleatum
QFGMNYFYDHW

SEQ ID NO: 2268 - protein, 8 aa, Fusobacterium nucleatum
YGALKVEY

SEQ ID NO: 2269 - protein, 9 aa, Fusobacterium nucleatum
AVNHGIIDF

SEQ ID NO: 2270 - protein, 8 aa, Fusobacterium nucleatum
ARIVATSI

SEQ ID NO: 2271 - protein, 11 aa, Fusobacterium nucleatum
NLGATQNTMLY

SEQ ID NO: 2272 - protein, 10 aa, Fusobacterium nucleatum
IYTAEGASTI

SEQ ID NO: 2273 - protein, 10 aa, Fusobacterium nucleatum
IVHNRFKFKD

SEQ ID NO: 2274 - protein, 9 aa, Fusobacterium nucleatum
REELKTSVG

SEQ ID NO: 2275 - protein, 9 aa, Fusobacterium nucleatum
MTGSPSVAM

SEQ ID NO: 2276 - protein, 10 aa, Fusobacterium nucleatum
IATNEDTINV

SEQ ID NO: 2277 - protein, 8 aa, Fusobacterium nucleatum
KTDTAGVI

SEQ ID NO: 2278 - protein, 11 aa, Fusobacterium nucleatum
HNKLERKFLVV

SEQ ID NO: 2279 - protein, 9 aa, Fusobacterium nucleatum
IYSNANNTK

SEQ ID NO: 2280 - protein, 10 aa, Fusobacterium nucleatum
TSIGKRSLGM

SEQ ID NO: 2281 - protein, 11 aa, Fusobacterium nucleatum
TRGNWKVRNAM

SEQ ID NO: 2282 - protein, 9 aa, Fusobacterium nucleatum
ETSIVTGKT

SEQ ID NO: 2283 - protein, 10 aa, Fusobacterium nucleatum
TAESGVGIFV

SEQ ID NO: 2284 - protein, 10 aa, Fusobacterium nucleatum
YAPKANISKV

SEQ ID NO: 2285 - protein, 9 aa, Fusobacterium nucleatum
AIASEGTTF

SEQ ID NO: 2286 - protein, 11 aa, Fusobacterium nucleatum
GENTSTGTISL

SEQ ID NO: 2287 - protein, 10 aa, Fusobacterium nucleatum
VQATGNILDK

SEQ ID NO: 2288 - protein, 10 aa, Fusobacterium nucleatum
VSFGEGASLF

SEQ ID NO: 2289 - protein, 10 aa, Fusobacterium nucleatum
LTNAEKIENK

SEQ ID NO: 2290 - protein, 11 aa, Fusobacterium nucleatum
KMSGSPSVAMY

SEQ ID NO: 2291 - protein, 10 aa, Fusobacterium nucleatum
EVTNSGLVKM

SEQ ID NO: 2292 - protein, 11 aa, Fusobacterium nucleatum
GSTQNTMLYLK

SEQ ID NO: 2293 - protein, 9 aa, Fusobacterium nucleatum
GNITINQKK

SEQ ID NO: 2294 - protein, 9 aa, Fusobacterium nucleatum
LVVDEIFHA

SEQ ID NO: 2295 - protein, 9 aa, Fusobacterium nucleatum
YTYGIGIKN

SEQ ID NO: 2296 - protein, 9 aa, Fusobacterium nucleatum
MFAQAEAGK

SEQ ID NO: 2297 - protein, 9 aa, Fusobacterium nucleatum
EASVGIYAK

SEQ ID NO: 2298 - protein, 10 aa, Fusobacterium nucleatum
MQNKNAVGIL

SEQ ID NO: 2299 - protein, 9 aa, Fusobacterium nucleatum
IYSKTPSSV

SEQ ID NO: 2300 - protein, 9 aa, Fusobacterium nucleatum
KAVPTREEI

SEQ ID NO: 2301 - protein, 10 aa, Fusobacterium nucleatum
GIVTVFNKGV

SEQ ID NO: 2302 - protein, 10 aa, Fusobacterium nucleatum
SIKPEVGTEL

SEQ ID NO: 2303 - protein, 10 aa, Fusobacterium nucleatum
NFSNKGVLAY

SEQ ID NO: 2304 - protein, 9 aa, Fusobacterium nucleatum
ITKKIGATG

SEQ ID NO: 2305 - protein, 9 aa, Fusobacterium nucleatum
MTGKVYTDV

SEQ ID NO: 2306 - protein, 10 aa, Fusobacterium nucleatum
SWQFGMNYFY

SEQ ID NO: 2307 - protein, 9 aa, Fusobacterium nucleatum
LQGTGNGII

SEQ ID NO: 2308 - protein, 11 aa, Fusobacterium nucleatum
SLENKESVGIF

SEQ ID NO: 2309 - protein, 11 aa, Fusobacterium nucleatum
YTKGIKVGNTV

SEQ ID NO: 2310 - protein, 10 aa, Fusobacterium nucleatum
SISSSTNGNR

SEQ ID NO: 2311 - protein, 8 aa, Fusobacterium nucleatum
STVNIDHW

SEQ ID NO: 2312 - protein, 8 aa, Fusobacterium nucleatum
FEPAIGIY

SEQ ID NO: 2313 - protein, 10 aa, Fusobacterium nucleatum
VSKNVKNEGK

SEQ ID NO: 2314 - protein, 9 aa, Fusobacterium nucleatum
RTINANGAS

SEQ ID NO: 2315 - protein, 10 aa, Fusobacterium nucleatum
GEIKVDAAYS

SEQ ID NO: 2316 - protein, 10 aa, Fusobacterium nucleatum
MAKLPYTSFV

SEQ ID NO: 2317 - protein, 9 aa, Fusobacterium nucleatum
NESAVINSG

SEQ ID NO: 2318 - protein, 9 aa, Fusobacterium nucleatum
NARIVATSI

SEQ ID NO: 2319 - protein, 9 aa, Fusobacterium nucleatum
GRSALSDSK

SEQ ID NO: 2320 - protein, 9 aa, Fusobacterium nucleatum
ATSKAKAIL

SEQ ID NO: 2321 - protein, 10 aa, Fusobacterium nucleatum
IGMYGKGIGT

SEQ ID NO: 2322 - protein, 9 aa, Fusobacterium nucleatum
GLNETTGTI

SEQ ID NO: 2323 - protein, 11 aa, Fusobacterium nucleatum
LTSIAGSLTWI

SEQ ID NO: 2324 - protein, 10 aa, Fusobacterium nucleatum
LAYKHYFGAK

SEQ ID NO: 2325 - protein, 11 aa, Fusobacterium nucleatum
TSFGEGASIFY

SEQ ID NO: 2326 - protein, 9 aa, Fusobacterium nucleatum
NFVSDAESI

SEQ ID NO: 2327 - protein, 11 aa, Fusobacterium nucleatum
GIYTRGNWKVR

SEQ ID NO: 2328 - protein, 10 aa, Fusobacterium nucleatum
IYTRGNWKVR

SEQ ID NO: 2329 - protein, 11 aa, Fusobacterium nucleatum
STAMFINSARG

SEQ ID NO: 2330 - protein, 9 aa, Fusobacterium nucleatum
KYYTYGIGI

SEQ ID NO: 2331 - protein, 10 aa, Fusobacterium nucleatum
YENELGRVAN

SEQ ID NO: 2332 - protein, 10 aa, Fusobacterium nucleatum
KMHRKFLVVD

SEQ ID NO: 2333 - protein, 9 aa, Fusobacterium nucleatum
QAYIDELQK

SEQ ID NO: 2334 - protein, 11 aa, Fusobacterium nucleatum
KGIKVGNTVPR

SEQ ID NO: 2335 - protein, 11 aa, Fusobacterium nucleatum
TSVNDGSITAK

SEQ ID NO: 2336 - protein, 9 aa, Fusobacterium nucleatum
GLYSADPTK

SEQ ID NO: 2337 - protein, 8 aa, Fusobacterium nucleatum
SAVINSGR

SEQ ID NO: 2338 - protein, 10 aa, Fusobacterium nucleatum
IYNNTNTGTV

SEQ ID NO: 2339 - protein, 9 aa, Fusobacterium nucleatum
LRLELIQLM

SEQ ID NO: 2340 - protein, 9 aa, Fusobacterium nucleatum
YAENTNLTT

SEQ ID NO: 2341 - protein, 9 aa, Fusobacterium nucleatum
KSGEVRLEV

SEQ ID NO: 2342 - protein, 10 aa, Fusobacterium nucleatum
NEGTNATITM

SEQ ID NO: 2343 - protein, 11 aa, Fusobacterium nucleatum
DMNALDSVEKR

SEQ ID NO: 2344 - protein, 10 aa, Fusobacterium nucleatum
KEEMSAGMYV

SEQ ID NO: 2345 - protein, 9 aa, Fusobacterium nucleatum
MNALDSVEK

SEQ ID NO: 2346 - protein, 8 aa, Fusobacterium nucleatum
TAGVIDYK

SEQ ID NO: 2347 - protein, 10 aa, Fusobacterium nucleatum
DLNVGIDNQR

SEQ ID NO: 2348 - protein, 9 aa, Fusobacterium nucleatum
IAKRYKSVK

SEQ ID NO: 2349 - protein, 11 aa, Fusobacterium nucleatum
WFVKGDVIKPF

SEQ ID NO: 2350 - protein, 10 aa, Fusobacterium nucleatum
GTKGIEIVEK

SEQ ID NO: 2351 - protein, 8 aa, Fusobacterium nucleatum
YLFNGIYT

SEQ ID NO: 2352 - protein, 11 aa, Fusobacterium nucleatum
KKGSTVNIDHW

SEQ ID NO: 2353 - protein, 10 aa, Fusobacterium nucleatum
ITAKENIGLM

SEQ ID NO: 2354 - protein, 8 aa, Fusobacterium nucleatum
RPEIGTEL

SEQ ID NO: 2355 - protein, 10 aa, Fusobacterium nucleatum
GEYKTDTAGV

SEQ ID NO: 2356 - protein, 10 aa, Fusobacterium nucleatum
GMYGKGVGTT

SEQ ID NO: 2357 - protein, 9 aa, Fusobacterium nucleatum
TAKENIGLM

SEQ ID NO: 2358 - protein, 9 aa, Fusobacterium nucleatum
LPYTSFVKK

SEQ ID NO: 2359 - protein, 10 aa, Fusobacterium nucleatum
ESLIGMFAQA

SEQ ID NO: 2360 - protein, 9 aa, Fusobacterium nucleatum
AESGKTASV

SEQ ID NO: 2361 - protein, 10 aa, Fusobacterium nucleatum
SLIGMFAQAE

SEQ ID NO: 2362 - protein, 9 aa, Fusobacterium nucleatum
AYIEGNSIL

SEQ ID NO: 2363 - protein, 10 aa, Fusobacterium nucleatum
TVQTLEAPAV

SEQ ID NO: 2364 - protein, 9 aa, Fusobacterium nucleatum
VPFDDNNSL

SEQ ID NO: 2365 - protein, 9 aa, Fusobacterium nucleatum
DIDGANPPI

SEQ ID NO: 2366 - protein, 9 aa, Fusobacterium nucleatum
VYVGKTDDI

SEQ ID NO: 2367 - protein, 9 aa, Fusobacterium nucleatum
ATPPINSQL

SEQ ID NO: 2368 - protein, 9 aa, Fusobacterium nucleatum
GIYAKETSI

SEQ ID NO: 2369 - protein, 9 aa, Fusobacterium nucleatum
FRLSEGFSI

SEQ ID NO: 2370 - protein, 10 aa, Fusobacterium nucleatum
EKSIGIYSKT

SEQ ID NO: 2371 - protein, 9 aa, Fusobacterium nucleatum
KARVAGTTA

SEQ ID NO: 2372 - protein, 10 aa, Fusobacterium nucleatum
ESTAVGKENV

SEQ ID NO: 2373 - protein, 10 aa, Fusobacterium nucleatum
DKAKYAIGIY

SEQ ID NO: 2374 - protein, 8 aa, Fusobacterium nucleatum
IAKRYKSV

SEQ ID NO: 2375 - protein, 9 aa, Fusobacterium nucleatum
LENKEAVGI

SEQ ID NO: 2376 - protein, 10 aa, Fusobacterium nucleatum
WYTGIVHNTF

SEQ ID NO: 2377 - protein, 11 aa, Fusobacterium nucleatum
KSKYYTYGIGI

SEQ ID NO: 2378 - protein, 10 aa, Fusobacterium nucleatum
YTAQGTGNGI

SEQ ID NO: 2379 - protein, 10 aa, Fusobacterium nucleatum
GMLGQNASSI

SEQ ID NO: 2380 - protein, 11 aa, Fusobacterium nucleatum
EGASLFYATSK

SEQ ID NO: 2381 - protein, 10 aa, Fusobacterium nucleatum
KEVTKQAISL

SEQ ID NO: 2382 - protein, 9 aa, Fusobacterium nucleatum
KGTIITEKK

SEQ ID NO: 2383 - protein, 9 aa, Fusobacterium nucleatum
GIKNHGMTI

SEQ ID NO: 2384 - protein, 8 aa, Fusobacterium nucleatum
ILFLMLGV

SEQ ID NO: 2385 - protein, 9 aa, Fusobacterium nucleatum
IAINGTVGF

SEQ ID NO: 2386 - protein, 10 aa, Fusobacterium nucleatum
LIIGTEYSEK

SEQ ID NO: 2387 - protein, 10 aa, Fusobacterium nucleatum
KITGSPSVAM

SEQ ID NO: 2388 - protein, 10 aa, Fusobacterium nucleatum
LFLMLGVSAF

SEQ ID NO: 2389 - protein, 10 aa, Fusobacterium nucleatum
SIAGSLTWIA

SEQ ID NO: 2390 - protein, 9 aa, Fusobacterium nucleatum
KTNKKQWFV

SEQ ID NO: 2391 - protein, 10 aa, Fusobacterium nucleatum
GMFAQAEAGK

SEQ ID NO: 2392 - protein, 11 aa, Fusobacterium nucleatum
EVEILARISPK

SEQ ID NO: 2393 - protein, 9 aa, Fusobacterium nucleatum
KVYTDVSKI

SEQ ID NO: 2394 - protein, 10 aa, Fusobacterium nucleatum
TAKLSLTNKK

SEQ ID NO: 2395 - protein, 10 aa, Fusobacterium nucleatum
IVNKEASVGI

SEQ ID NO: 2396 - protein, 10 aa, Fusobacterium nucleatum
IQLKPEDPHY

SEQ ID NO: 2397 - protein, 11 aa, Fusobacterium nucleatum
DIFVGYNKMHR

SEQ ID NO: 2398 - protein, 10 aa, Fusobacterium nucleatum
VGLYSKGQSY

SEQ ID NO: 2399 - protein, 11 aa, Fusobacterium nucleatum
EETSAGMLGKV

SEQ ID NO: 2400 - protein, 8 aa, Fusobacterium nucleatum
KESVGIFA

SEQ ID NO: 2401 - protein, 9 aa, Fusobacterium nucleatum
TMGNDSVFL

SEQ ID NO: 2402 - protein, 10 aa, Fusobacterium nucleatum
FTNNGTIDFS

SEQ ID NO: 2403 - protein, 10 aa, Fusobacterium nucleatum
NENVTGLVGV

SEQ ID NO: 2404 - protein, 9 aa, Fusobacterium nucleatum
KVKSAVTAS

SEQ ID NO: 2405 - protein, 9 aa, Fusobacterium nucleatum
VSQAYIDEL

SEQ ID NO: 2406 - protein, 9 aa, Fusobacterium nucleatum
FYDHWGSEY

SEQ ID NO: 2407 - protein, 9 aa, Fusobacterium nucleatum
RIYNNKSIG

SEQ ID NO: 2408 - protein, 9 aa, Fusobacterium nucleatum
HYFGIKTLR

SEQ ID NO: 2409 - protein, 9 aa, Fusobacterium nucleatum
GTTAGTGIF

SEQ ID NO: 2410 - protein, 9 aa, Fusobacterium nucleatum
LINNSKISL

SEQ ID NO: 2411 - protein, 10 aa, Fusobacterium nucleatum
IWQEGNFEAV

SEQ ID NO: 2412 - protein, 9 aa, Fusobacterium nucleatum
NIANSANSF

SEQ ID NO: 2413 - protein, 8 aa, Fusobacterium nucleatum
VLAEKYKV

SEQ ID NO: 2414 - protein, 9 aa, Fusobacterium nucleatum
AVYVSNGGK

SEQ ID NO: 2415 - protein, 10 aa, Fusobacterium nucleatum
NGASHLIAFY

SEQ ID NO: 2416 - protein, 11 aa, Fusobacterium nucleatum
GLNETTGTITV

SEQ ID NO: 2417 - protein, 8 aa, Fusobacterium nucleatum
TNKKTITL

SEQ ID NO: 2418 - protein, 10 aa, Fusobacterium nucleatum
EGNSALTGVK

SEQ ID NO: 2419 - protein, 10 aa, Fusobacterium nucleatum
GSSAVYVSKG

SEQ ID NO: 2420 - protein, 10 aa, Fusobacterium nucleatum
PEVGTELAYR

SEQ ID NO: 2421 - protein, 10 aa, Fusobacterium nucleatum
SKFISHLGNL

SEQ ID NO: 2422 - protein, 9 aa, Fusobacterium nucleatum
YNKMHRKFL

SEQ ID NO: 2423 - protein, 9 aa, Fusobacterium nucleatum
TMTTATNIA

SEQ ID NO: 2424 - protein, 9 aa, Fusobacterium nucleatum
TSFGEGASI

SEQ ID NO: 2425 - protein, 10 aa, Fusobacterium nucleatum
SKISIGAKSY

SEQ ID NO: 2426 - protein, 8 aa, Fusobacterium nucleatum
TQNTMLYL

SEQ ID NO: 2427 - protein, 9 aa, Fusobacterium nucleatum
KSNISKVGT

SEQ ID NO: 2428 - protein, 9 aa, Fusobacterium nucleatum
DTNGNITVK

SEQ ID NO: 2429 - protein, 9 aa, Fusobacterium nucleatum
VGKDGIAFY

SEQ ID NO: 2430 - protein, 11 aa, Fusobacterium nucleatum
RTINANGASHL

SEQ ID NO: 2431 - protein, 10 aa, Fusobacterium nucleatum
NTFKIESGKT

SEQ ID NO: 2432 - protein, 9 aa, Fusobacterium nucleatum
SFGEGASLF

SEQ ID NO: 2433 - protein, 10 aa, Fusobacterium nucleatum
EGIKNHSMTW

SEQ ID NO: 2434 - protein, 11 aa, Fusobacterium nucleatum
NNTDPNKTNIY

SEQ ID NO: 2435 - protein, 9 aa, Fusobacterium nucleatum
NHGKILIDA

SEQ ID NO: 2436 - protein, 11 aa, Fusobacterium nucleatum
LENLREPTNEV

SEQ ID NO: 2437 - protein, 9 aa, Fusobacterium nucleatum
GVSAFSEEV

SEQ ID NO: 2438 - protein, 9 aa, Fusobacterium nucleatum
YVKNGTSKA

SEQ ID NO: 2439 - protein, 10 aa, Fusobacterium nucleatum
TEINDQASKI

SEQ ID NO: 2440 - protein, 8 aa, Fusobacterium nucleatum
EAVGIFAK

SEQ ID NO: 2441 - protein, 9 aa, Fusobacterium nucleatum
ILAEKKKSA

SEQ ID NO: 2442 - protein, 10 aa, Fusobacterium nucleatum
SQESAGIYAP

SEQ ID NO: 2443 - protein, 10 aa, Fusobacterium nucleatum
GVYAVNGTEI

SEQ ID NO: 2444 - protein, 9 aa, Fusobacterium nucleatum
EIGTELAYR

SEQ ID NO: 2445 - protein, 11 aa, Fusobacterium nucleatum
ILAENGVGIFV

SEQ ID NO: 2446 - protein, 10 aa, Fusobacterium nucleatum
ILVTNESAVI

SEQ ID NO: 2447 - protein, 9 aa, Fusobacterium nucleatum
ATNEKNIGI

SEQ ID NO: 2448 - protein, 10 aa, Fusobacterium nucleatum
INIANSANSF

SEQ ID NO: 2449 - protein, 9 aa, Fusobacterium nucleatum
NETTGTITV

SEQ ID NO: 2450 - protein, 8 aa, Fusobacterium nucleatum
KTMGRVLM

SEQ ID NO: 2451 - protein, 10 aa, Fusobacterium nucleatum
VYLQGASGDK

SEQ ID NO: 2452 - protein, 11 aa, Fusobacterium nucleatum
KGQSYTVRNSV

SEQ ID NO: 2453 - protein, 9 aa, Fusobacterium nucleatum
KSAGVYVKL

SEQ ID NO: 2454 - protein, 9 aa, Fusobacterium nucleatum
IKNHGMTIW

SEQ ID NO: 2455 - protein, 10 aa, Fusobacterium nucleatum
VNQNRVAYYV

SEQ ID NO: 2456 - protein, 10 aa, Fusobacterium nucleatum
TEQMKAVPTR

SEQ ID NO: 2457 - protein, 9 aa, Fusobacterium nucleatum
IESGKTLDV

SEQ ID NO: 2458 - protein, 9 aa, Fusobacterium nucleatum
FSAAEKSTA

SEQ ID NO: 2459 - protein, 10 aa, Fusobacterium nucleatum
KESNLGLSDI

SEQ ID NO: 2460 - protein, 9 aa, Fusobacterium nucleatum
KETVGMMIT

SEQ ID NO: 2461 - protein, 8 aa, Fusobacterium nucleatum
TWIATPVL

SEQ ID NO: 2462 - protein, 10 aa, Fusobacterium nucleatum
VLVANNGANV

SEQ ID NO: 2463 - protein, 11 aa, Fusobacterium nucleatum
NTKKSVGMYAK

SEQ ID NO: 2464 - protein, 10 aa, Fusobacterium nucleatum
GVYAKKGSTV

SEQ ID NO: 2465 - protein, 9 aa, Fusobacterium nucleatum
LGVAYENEL

SEQ ID NO: 2466 - protein, 9 aa, Fusobacterium nucleatum
MGNDSVFLY

SEQ ID NO: 2467 - protein, 10 aa, Fusobacterium nucleatum
NTGKIELEAV

SEQ ID NO: 2468 - protein, 10 aa, Fusobacterium nucleatum
LAENGVGIFV

SEQ ID NO: 2469 - protein, 9 aa, Fusobacterium nucleatum
ILVGATDDI

SEQ ID NO: 2470 - protein, 8 aa, Fusobacterium nucleatum
STQNTMLY

SEQ ID NO: 2471 - protein, 8 aa, Fusobacterium nucleatum
DIFVGHNK

SEQ ID NO: 2472 - protein, 10 aa, Fusobacterium nucleatum
TNSNLINNSK

SEQ ID NO: 2473 - protein, 11 aa, Fusobacterium nucleatum
IYSTTNSNVEM

SEQ ID NO: 2474 - protein, 10 aa, Fusobacterium nucleatum
GTITLKDSTV

SEQ ID NO: 2475 - protein, 9 aa, Fusobacterium nucleatum
NLKEPTNEV

SEQ ID NO: 2476 - protein, 9 aa, Fusobacterium nucleatum
DTAKNSGTI

SEQ ID NO: 2477 - protein, 10 aa, Fusobacterium nucleatum
IQGVGVYAKK

SEQ ID NO: 2478 - protein, 10 aa, Fusobacterium nucleatum
TVNQNRVAYY

SEQ ID NO: 2479 - protein, 9 aa, Fusobacterium nucleatum
AQAESGKTA

SEQ ID NO: 2480 - protein, 11 aa, Fusobacterium nucleatum
EVAYENELGRV

SEQ ID NO: 2481 - protein, 9 aa, Fusobacterium nucleatum
SIATNEDTI

SEQ ID NO: 2482 - protein, 9 aa, Fusobacterium nucleatum
YLNNNTSDK

SEQ ID NO: 2483 - protein, 11 aa, Fusobacterium nucleatum
VKTFGMKGEYK

SEQ ID NO: 2484 - protein, 10 aa, Fusobacterium nucleatum
KLPYTSFVNK

SEQ ID NO: 2485 - protein, 11 aa, Fusobacterium nucleatum
SMTWQEGNFEA

SEQ ID NO: 2486 - protein, 10 aa, Fusobacterium nucleatum
GKVADTASAK

SEQ ID NO: 2487 - protein, 10 aa, Fusobacterium nucleatum
EVGEKSIGIY

SEQ ID NO: 2488 - protein, 10 aa, Fusobacterium nucleatum
GAYIEGNSAL

SEQ ID NO: 2489 - protein, 10 aa, Fusobacterium nucleatum
NTGDITVGDK

SEQ ID NO: 2490 - protein, 8 aa, Fusobacterium nucleatum
MYSSSSLK

SEQ ID NO: 2491 - protein, 11 aa, Fusobacterium nucleatum
LTMTTATNIAL

SEQ ID NO: 2492 - protein, 9 aa, Fusobacterium nucleatum
LARISPKEV

SEQ ID NO: 2493 - protein, 9 aa, Fusobacterium nucleatum
LQAKVGLFK

SEQ ID NO: 2494 - protein, 10 aa, Fusobacterium nucleatum
STALNNARIV

SEQ ID NO: 2495 - protein, 9 aa, Fusobacterium nucleatum
TASAATNEK

SEQ ID NO: 2496 - protein, 9 aa, Fusobacterium nucleatum
KKSVGMYAK

SEQ ID NO: 2497 - protein, 9 aa, Fusobacterium nucleatum
STADNNDTI

SEQ ID NO: 2498 - protein, 10 aa, Fusobacterium nucleatum
TMGNDSVFLY

SEQ ID NO: 2499 - protein, 9 aa, Fusobacterium nucleatum
AYLENSKFI

SEQ ID NO: 2500 - protein, 11 aa, Fusobacterium nucleatum
LNWTISGDMFV

SEQ ID NO: 2501 - protein, 9 aa, Fusobacterium nucleatum
KSTAMFINS

SEQ ID NO: 2502 - protein, 11 aa, Fusobacterium nucleatum
VTLGTNTIKLK

SEQ ID NO: 2503 - protein, 8 aa, Fusobacterium nucleatum
SFGIVTVF

SEQ ID NO: 2504 - protein, 9 aa, Fusobacterium nucleatum
YSKINSSSI

SEQ ID NO: 2505 - protein, 9 aa, Fusobacterium nucleatum
LTNKKDINI

SEQ ID NO: 2506 - protein, 10 aa, Fusobacterium nucleatum
NRVAYYVNGK

SEQ ID NO: 2507 - protein, 10 aa, Fusobacterium nucleatum
TMQNKNAVGI

SEQ ID NO: 2508 - protein, 9 aa, Fusobacterium nucleatum
IKNEIGKEF

SEQ ID NO: 2509 - protein, 11 aa, Fusobacterium nucleatum
AYNFTDGLEQR

SEQ ID NO: 2510 - protein, 10 aa, Fusobacterium nucleatum
SDSKYTSGVY

SEQ ID NO: 2511 - protein, 11 aa, Fusobacterium nucleatum
DVQGVGVYGKK

SEQ ID NO: 2512 - protein, 9 aa, Fusobacterium nucleatum
FVRDNGVGK

SEQ ID NO: 2513 - protein, 8 aa, Fusobacterium nucleatum
KYLFNGIY

SEQ ID NO: 2514 - protein, 9 aa, Fusobacterium nucleatum
GSKLKIGEK

SEQ ID NO: 2515 - protein, 8 aa, Fusobacterium nucleatum
LRLELIQL

SEQ ID NO: 2516 - protein, 9 aa, Fusobacterium nucleatum
ATSIGKRSL

SEQ ID NO: 2517 - protein, 10 aa, Fusobacterium nucleatum
AQKASAGIYA

SEQ ID NO: 2518 - protein, 9 aa, Fusobacterium nucleatum
VYAVNGAQV

SEQ ID NO: 2519 - protein, 9 aa, Fusobacterium nucleatum
LMEQGDQVV

SEQ ID NO: 2520 - protein, 10 aa, Fusobacterium nucleatum
SIGIMGEKSK

SEQ ID NO: 2521 - protein, 10 aa, Fusobacterium nucleatum
VKTFGMKGEY

SEQ ID NO: 2522 - protein, 9 aa, Fusobacterium nucleatum
ESITGTKDK

SEQ ID NO: 2523 - protein, 9 aa, Fusobacterium nucleatum
YRHYFGTKT

SEQ ID NO: 2524 - protein, 10 aa, Fusobacterium nucleatum
YSKKEGGAKL

SEQ ID NO: 2525 - protein, 10 aa, Fusobacterium nucleatum
DSEPTAVYAV

SEQ ID NO: 2526 - protein, 9 aa, Fusobacterium nucleatum
SPSVAMYAE

SEQ ID NO: 2527 - protein, 9 aa, Fusobacterium nucleatum
YINANKNLK

SEQ ID NO: 2528 - protein, 9 aa, Fusobacterium nucleatum
AKFINRGEI

SEQ ID NO: 2529 - protein, 8 aa, Fusobacterium nucleatum
KPRMVLTH

SEQ ID NO: 2530 - protein, 9 aa, Fusobacterium nucleatum
ITMQNKNAV

SEQ ID NO: 2531 - protein, 8 aa, Fusobacterium nucleatum
VQATGIVL

SEQ ID NO: 2532 - protein, 9 aa, Fusobacterium nucleatum
MYLINAEKI

SEQ ID NO: 2533 - protein, 9 aa, Fusobacterium nucleatum
KKKNKAVVL

SEQ ID NO: 2534 - protein, 11 aa, Fusobacterium nucleatum
YIKGIKVGNTV

SEQ ID NO: 2535 - protein, 9 aa, Fusobacterium nucleatum
RIDKGIGIY

SEQ ID NO: 2536 - protein, 9 aa, Fusobacterium nucleatum
NHGKIYIDA

SEQ ID NO: 2537 - protein, 11 aa, Fusobacterium nucleatum
TIWQEGNFEAV

SEQ ID NO: 2538 - protein, 10 aa, Fusobacterium nucleatum
FRLSEDFSIR

SEQ ID NO: 2539 - protein, 8 aa, Fusobacterium nucleatum
TTPITAGK

SEQ ID NO: 2540 - protein, 10 aa, Fusobacterium nucleatum
TDSYAGRDGK

SEQ ID NO: 2541 - protein, 10 aa, Fusobacterium nucleatum
VTGLVGVAVM

SEQ ID NO: 2542 - protein, 11 aa, Fusobacterium nucleatum
KTDDIDPMTGK

SEQ ID NO: 2543 - protein, 10 aa, Fusobacterium nucleatum
MYGKGIGTTV

SEQ ID NO: 2544 - protein, 10 aa, Fusobacterium nucleatum
ASAKINLGTV

SEQ ID NO: 2545 - protein, 9 aa, Fusobacterium nucleatum
NQRVGGRPL

SEQ ID NO: 2546 - protein, 10 aa, Fusobacterium nucleatum
KETSISSVSK

SEQ ID NO: 2547 - protein, 9 aa, Fusobacterium nucleatum
NTSTGTISL

SEQ ID NO: 2548 - protein, 10 aa, Fusobacterium nucleatum
NSIGIMGEKS

SEQ ID NO: 2549 - protein, 9 aa, Fusobacterium nucleatum
GATKNVGIY

SEQ ID NO: 2550 - protein, 11 aa, Fusobacterium nucleatum
AENQRVGGRPL

SEQ ID NO: 2551 - protein, 9 aa, Fusobacterium nucleatum
FGEGASIFY

SEQ ID NO: 2552 - protein, 10 aa, Fusobacterium nucleatum
KRIFNKLNSI

SEQ ID NO: 2553 - protein, 11 aa, Fusobacterium nucleatum
ITKKIGATGGK

SEQ ID NO: 2554 - protein, 11 aa, Fusobacterium nucleatum
GWYTGIVHNTF

SEQ ID NO: 2555 - protein, 10 aa, Fusobacterium nucleatum
KLDKAAGGTI

SEQ ID NO: 2556 - protein, 9 aa, Fusobacterium nucleatum
IEVKNEGSA

SEQ ID NO: 2557 - protein, 10 aa, Fusobacterium nucleatum
NWTISGDMFV

SEQ ID NO: 2558 - protein, 9 aa, Fusobacterium nucleatum
SSSIANKTV

SEQ ID NO: 2559 - protein, 10 aa, Fusobacterium nucleatum
GSEYKGRGDK

SEQ ID NO: 2560 - protein, 11 aa, Fusobacterium nucleatum
NANGASHLIAF

SEQ ID NO: 2561 - protein, 8 aa, Fusobacterium nucleatum
YFGIKTLR

SEQ ID NO: 2562 - protein, 9 aa, Fusobacterium nucleatum
GGVGLRVIF

SEQ ID NO: 2563 - protein, 9 aa, Fusobacterium nucleatum
KIVYGIGMA

SEQ ID NO: 2564 - protein, 11 aa, Fusobacterium nucleatum
NKKTITANGKK

SEQ ID NO: 2565 - protein, 9 aa, Fusobacterium nucleatum
FRLSEDFSI

SEQ ID NO: 2566 - protein, 9 aa, Fusobacterium nucleatum
KKTLGVFLK

SEQ ID NO: 2567 - protein, 9 aa, Fusobacterium nucleatum
NTDPNKTNI

SEQ ID NO: 2568 - protein, 11 aa, Fusobacterium nucleatum
LMAEGIKNHSM

SEQ ID NO: 2569 - protein, 10 aa, Fusobacterium nucleatum
GMSDIGFYVD

SEQ ID NO: 2570 - protein, 9 aa, Fusobacterium nucleatum
KSAGILVTN

SEQ ID NO: 2571 - protein, 10 aa, Fusobacterium nucleatum
KSGEMKLEVK

SEQ ID NO: 2572 - protein, 9 aa, Fusobacterium nucleatum
HLRDSWSNP

SEQ ID NO: 2573 - protein, 9 aa, Fusobacterium nucleatum
QITGVAMAK

SEQ ID NO: 2574 - protein, 11 aa, Fusobacterium nucleatum
FLKGSQSFENK

SEQ ID NO: 2575 - protein, 11 aa, Fusobacterium nucleatum
KFLVVDEIFNA

SEQ ID NO: 2576 - protein, 10 aa, Fusobacterium nucleatum
LEKKESVGMY

SEQ ID NO: 2577 - protein, 8 aa, Fusobacterium nucleatum
KSVGMYAK

SEQ ID NO: 2578 - protein, 8 aa, Fusobacterium nucleatum
TSIGKRSL

SEQ ID NO: 2579 - protein, 10 aa, Fusobacterium nucleatum
NSYGVIIRGK

SEQ ID NO: 2580 - protein, 9 aa, Fusobacterium nucleatum
IYAPGGKAT

SEQ ID NO: 2581 - protein, 9 aa, Fusobacterium nucleatum
MLSKDTSSI

SEQ ID NO: 2582 - protein, 10 aa, Fusobacterium nucleatum
ASLFYATLKA

SEQ ID NO: 2583 - protein, 10 aa, Fusobacterium nucleatum
LKIGEKAVGL

SEQ ID NO: 2584 - protein, 9 aa, Fusobacterium nucleatum
LTQAYDEMM

SEQ ID NO: 2585 - protein, 9 aa, Fusobacterium nucleatum
LQTKINDAR

SEQ ID NO: 2586 - protein, 10 aa, Fusobacterium nucleatum
DMNALDSVEK

SEQ ID NO: 2587 - protein, 11 aa, Fusobacterium nucleatum
RPEIGTELAYR

SEQ ID NO: 2588 - protein, 10 aa, Fusobacterium nucleatum
KGETDIQSYI

SEQ ID NO: 2589 - protein, 9 aa, Fusobacterium nucleatum
NFNNHGNSA

SEQ ID NO: 2590 - protein, 10 aa, Fusobacterium nucleatum
ADWFNIRGEK

SEQ ID NO: 2591 - protein, 9 aa, Fusobacterium nucleatum
LTIKGELDI

SEQ ID NO: 2592 - protein, 10 aa, Fusobacterium nucleatum
ALRAATGTNK

SEQ ID NO: 2593 - protein, 9 aa, Fusobacterium nucleatum
VYTDVSKIV

SEQ ID NO: 2594 - protein, 8 aa, Fusobacterium nucleatum
FSHLRNSW

SEQ ID NO: 2595 - protein, 11 aa, Fusobacterium nucleatum
SKITNTGTGTK

SEQ ID NO: 2596 - protein, 9 aa, Fusobacterium nucleatum
NSSNGGVKI

SEQ ID NO: 2597 - protein, 11 aa, Fusobacterium nucleatum
ETSISSVSKNV

SEQ ID NO: 2598 - protein, 11 aa, Fusobacterium nucleatum
NLGMSDIGFYV

SEQ ID NO: 2599 - protein, 9 aa, Fusobacterium nucleatum
GSAAMLGEV

SEQ ID NO: 2600 - protein, 9 aa, Fusobacterium nucleatum
IKLGRGTGW

SEQ ID NO: 2601 - protein, 9 aa, Fusobacterium nucleatum
SAKINLGKV

SEQ ID NO: 2602 - protein, 11 aa, Fusobacterium nucleatum
SLGDASTGMYL

SEQ ID NO: 2603 - protein, 9 aa, Fusobacterium nucleatum
KSPWSSWQF

SEQ ID NO: 2604 - protein, 9 aa, Fusobacterium nucleatum
EESSVGIYS

SEQ ID NO: 2605 - protein, 11 aa, Fusobacterium nucleatum
VTLGSNTIKLK

SEQ ID NO: 2606 - protein, 10 aa, Fusobacterium nucleatum
GRNFKLTSIA

SEQ ID NO: 2607 - protein, 10 aa, Fusobacterium nucleatum
ENIGLMAEGI

SEQ ID NO: 2608 - protein, 11 aa, Fusobacterium nucleatum
EKTNKKQWFVK

SEQ ID NO: 2609 - protein, 11 aa, Fusobacterium nucleatum
DTASAKINLGK

SEQ ID NO: 2610 - protein, 11 aa, Fusobacterium nucleatum
SDITAKGSANF

SEQ ID NO: 2611 - protein, 11 aa, Fusobacterium nucleatum
VVAIASEGTTF

SEQ ID NO: 2612 - protein, 11 aa, Fusobacterium nucleatum
GFILNNTDPNK

SEQ ID NO: 2613 - protein, 11 aa, Fusobacterium nucleatum
VVDEIFNAKSK

SEQ ID NO: 2614 - protein, 11 aa, Fusobacterium nucleatum
DVADGYTGAYI

SEQ ID NO: 2615 - protein, 9 aa, Fusobacterium nucleatum
GKNKAKVAY

SEQ ID NO: 2616 - protein, 9 aa, Fusobacterium nucleatum
GSRATATDK

SEQ ID NO: 2617 - protein, 10 aa, Fusobacterium nucleatum
GTELAYRHYF

SEQ ID NO: 2618 - protein, 10 aa, Fusobacterium nucleatum
KATLDKNTSK

SEQ ID NO: 2619 - protein, 10 aa, Fusobacterium nucleatum
QNASSITNNK

SEQ ID NO: 2620 - protein, 9 aa, Fusobacterium nucleatum
SSNGTTIGI

SEQ ID NO: 2621 - protein, 10 aa, Fusobacterium nucleatum
EEQLQAKVGL

SEQ ID NO: 2622 - protein, 9 aa, Fusobacterium nucleatum
ITAPSAPSA

SEQ ID NO: 2623 - protein, 11 aa, Fusobacterium nucleatum
KNLTMTTATNI

SEQ ID NO: 2624 - protein, 10 aa, Fusobacterium nucleatum
ELEAVSSAGV

SEQ ID NO: 2625 - protein, 9 aa, Fusobacterium nucleatum
KSKITNTGT

SEQ ID NO: 2626 - protein, 9 aa, Fusobacterium nucleatum
ASKISIGAK

SEQ ID NO: 2627 - protein, 8 aa, Fusobacterium nucleatum
GLFKSVPF

SEQ ID NO: 2628 - protein, 8 aa, Fusobacterium nucleatum
KYSLGLAI

SEQ ID NO: 2629 - protein, 9 aa, Fusobacterium nucleatum
KAINKGTII

SEQ ID NO: 2630 - protein, 10 aa, Fusobacterium nucleatum
NQRLGVTGNV

SEQ ID NO: 2631 - protein, 10 aa, Fusobacterium nucleatum
FGLLNGNNTV

SEQ ID NO: 2632 - protein, 10 aa, Fusobacterium nucleatum
KYAIGIYADA

SEQ ID NO: 2633 - protein, 10 aa, Fusobacterium nucleatum
GMLAKEGSNI

SEQ ID NO: 2634 - protein, 10 aa, Fusobacterium nucleatum
GVYVDDGAKF

SEQ ID NO: 2635 - protein, 10 aa, Fusobacterium nucleatum
GTVGFTSVAK

SEQ ID NO: 2636 - protein, 10 aa, Fusobacterium nucleatum
RPYGALKVEY

SEQ ID NO: 2637 - protein, 10 aa, Fusobacterium nucleatum
FYDHWGSEYK

SEQ ID NO: 2638 - protein, 9 aa, Fusobacterium nucleatum
NTVAATSPS

SEQ ID NO: 2639 - protein, 10 aa, Fusobacterium nucleatum
IGIYAQGNYK

SEQ ID NO: 2640 - protein, 10 aa, Fusobacterium nucleatum
SNHLIAFYIK

SEQ ID NO: 2641 - protein, 9 aa, Fusobacterium nucleatum
IRPYGALKV

SEQ ID NO: 2642 - protein, 10 aa, Fusobacterium nucleatum
TMLYLKNSIA

SEQ ID NO: 2643 - protein, 10 aa, Fusobacterium nucleatum
SEVEKIGKLI

SEQ ID NO: 2644 - protein, 8 aa, Fusobacterium nucleatum
VAYTNADW

SEQ ID NO: 2645 - protein, 11 aa, Fusobacterium nucleatum
KVNQNRVAYYV

SEQ ID NO: 2646 - protein, 10 aa, Fusobacterium nucleatum
ARLENEKALK

SEQ ID NO: 2647 - protein, 9 aa, Fusobacterium nucleatum
MLGKVKSAV

SEQ ID NO: 2648 - protein, 9 aa, Fusobacterium nucleatum
MQNKNAVGI

SEQ ID NO: 2649 - protein, 9 aa, Fusobacterium nucleatum
GKLENSNSI

SEQ ID NO: 2650 - protein, 11 aa, Fusobacterium nucleatum
REPTNEVEILA

SEQ ID NO: 2651 - protein, 10 aa, Fusobacterium nucleatum
FAGVPTMPVR

SEQ ID NO: 2652 - protein, 8 aa, Fusobacterium nucleatum
TTNSNVEM

SEQ ID NO: 2653 - protein, 8 aa, Fusobacterium nucleatum
FLYSNGKA

SEQ ID NO: 2654 - protein, 10 aa, Fusobacterium nucleatum
WKVRNAMDVA

SEQ ID NO: 2655 - protein, 9 aa, Fusobacterium nucleatum
TVSLGNDSV

SEQ ID NO: 2656 - protein, 9 aa, Fusobacterium nucleatum
SPSDKAKYA

SEQ ID NO: 2657 - protein, 9 aa, Fusobacterium nucleatum
GTTADWFNI

SEQ ID NO: 2658 - protein, 10 aa, Fusobacterium nucleatum
NGIYTRGNWK

SEQ ID NO: 2659 - protein, 9 aa, Fusobacterium nucleatum
SKIVYGIGM

SEQ ID NO: 2660 - protein, 11 aa, Fusobacterium nucleatum
IRPYGALKVEY

SEQ ID NO: 2661 - protein, 10 aa, Fusobacterium nucleatum
RIDKGIGIYT

SEQ ID NO: 2662 - protein, 8 aa, Fusobacterium nucleatum
NSYGVLIR

SEQ ID NO: 2663 - protein, 10 aa, Fusobacterium nucleatum
MKAVPTREEI

SEQ ID NO: 2664 - protein, 9 aa, Fusobacterium nucleatum
TNADWFNIR

SEQ ID NO: 2665 - protein, 11 aa, Fusobacterium nucleatum
GIYGFYNKDTR

SEQ ID NO: 2666 - protein, 10 aa, Fusobacterium nucleatum
PEIGTELAYR

SEQ ID NO: 2667 - protein, 8 aa, Fusobacterium nucleatum
KEYIVGMA

SEQ ID NO: 2668 - protein, 10 aa, Fusobacterium nucleatum
IKLGKGTGWY

SEQ ID NO: 2669 - protein, 10 aa, Fusobacterium nucleatum
KNEIGKEFRL

SEQ ID NO: 2670 - protein, 11 aa, Fusobacterium nucleatum
TVNQNRVAYYV

SEQ ID NO: 2671 - protein, 10 aa, Fusobacterium nucleatum
GKTASVKNTK

SEQ ID NO: 2672 - protein, 10 aa, Fusobacterium nucleatum
VTVFNKGVPK

SEQ ID NO: 2673 - protein, 11 aa, Fusobacterium nucleatum
EEVRSEEGRVY

SEQ ID NO: 2674 - protein, 9 aa, Fusobacterium nucleatum
YTSGIYNTG

SEQ ID NO: 2675 - protein, 9 aa, Fusobacterium nucleatum
LTIENTGNI

SEQ ID NO: 2676 - protein, 9 aa, Fusobacterium nucleatum
KTITLSGEK

SEQ ID NO: 2677 - protein, 10 aa, Fusobacterium nucleatum
KLPYTSFVKK

SEQ ID NO: 2678 - protein, 9 aa, Fusobacterium nucleatum
IFHAKSKYY

SEQ ID NO: 2679 - protein, 9 aa, Fusobacterium nucleatum
LTIAGKKTL

SEQ ID NO: 2680 - protein, 10 aa, Fusobacterium nucleatum
IYNNKSIGMY

SEQ ID NO: 2681 - protein, 9 aa, Fusobacterium nucleatum
NEIGKEFRL

SEQ ID NO: 2682 - protein, 11 aa, Fusobacterium nucleatum
YFGIKTLRTSL

SEQ ID NO: 2683 - protein, 10 aa, Fusobacterium nucleatum
VYINANKNLK

SEQ ID NO: 2684 - protein, 10 aa, Fusobacterium nucleatum
GILATNSNLI

SEQ ID NO: 2685 - protein, 10 aa, Fusobacterium nucleatum
NIGIYAPGGK

SEQ ID NO: 2686 - protein, 10 aa, Fusobacterium nucleatum
GQSYTVRNSV

SEQ ID NO: 2687 - protein, 11 aa, Fusobacterium nucleatum
NYGTITTTDSY

SEQ ID NO: 2688 - protein, 9 aa, Fusobacterium nucleatum
VAGTTADWF

SEQ ID NO: 2689 - protein, 9 aa, Fusobacterium nucleatum
AESIGIYSN

SEQ ID NO: 2690 - protein, 9 aa, Fusobacterium nucleatum
ALDSVEKRI

SEQ ID NO: 2691 - protein, 10 aa, Fusobacterium nucleatum
TVSNGSSAVY

SEQ ID NO: 2692 - protein, 11 aa, Fusobacterium nucleatum
IYGFYNKDTRK

SEQ ID NO: 2693 - protein, 9 aa, Fusobacterium nucleatum
FHAKSKYYT

SEQ ID NO: 2694 - protein, 11 aa, Fusobacterium nucleatum
RGEIRTTDSYA

SEQ ID NO: 2695 - protein, 8 aa, Fusobacterium nucleatum
KSAGIIGK

SEQ ID NO: 2696 - protein, 9 aa, Fusobacterium nucleatum
GEIRTTDSY

SEQ ID NO: 2697 - protein, 9 aa, Fusobacterium nucleatum
SAKKSTGIF

SEQ ID NO: 2698 - protein, 11 aa, Fusobacterium nucleatum
NQVVKSPWSSW

SEQ ID NO: 2699 - protein, 10 aa, Fusobacterium nucleatum
YKHYFGTKTL

SEQ ID NO: 2700 - protein, 9 aa, Fusobacterium nucleatum
NTFEIETGK

SEQ ID NO: 2701 - protein, 11 aa, Fusobacterium nucleatum
AKLPYTSFVKK

SEQ ID NO: 2702 - protein, 9 aa, Fusobacterium nucleatum
QVDDQASKI

SEQ ID NO: 2703 - protein, 10 aa, Fusobacterium nucleatum
AENKGIILAE

SEQ ID NO: 2704 - protein, 9 aa, Fusobacterium nucleatum
IIRGKRDSK

SEQ ID NO: 2705 - protein, 11 aa, Fusobacterium nucleatum
NLKPRMVLTHV

SEQ ID NO: 2706 - protein, 10 aa, Fusobacterium nucleatum
FTDGLEQRYD

SEQ ID NO: 2707 - protein, 9 aa, Fusobacterium nucleatum
PTKFNNTFK

SEQ ID NO: 2708 - protein, 9 aa, Fusobacterium nucleatum
VTMGNDSVF

SEQ ID NO: 2709 - protein, 11 aa, Fusobacterium nucleatum
SSAVYVSKGGK

SEQ ID NO: 2710 - protein, 9 aa, Fusobacterium nucleatum
IQSYTKGIK

SEQ ID NO: 2711 - protein, 10 aa, Fusobacterium nucleatum
TTSEIIVNKE

SEQ ID NO: 2712 - protein, 9 aa, Fusobacterium nucleatum
GVLAEKYKV

SEQ ID NO: 2713 - protein, 11 aa, Fusobacterium nucleatum
KRIFNKLNSIG

SEQ ID NO: 2714 - protein, 10 aa, Fusobacterium nucleatum
NSAGIMVVNE

SEQ ID NO: 2715 - protein, 11 aa, Fusobacterium nucleatum
GTVNQNRVAYY

SEQ ID NO: 2716 - protein, 10 aa, Fusobacterium nucleatum
ANSANSFEPA

SEQ ID NO: 2717 - protein, 11 aa, Fusobacterium nucleatum
NNKTISVTAEK

SEQ ID NO: 2718 - protein, 10 aa, Fusobacterium nucleatum
KEDRKGNVKF

SEQ ID NO: 2719 - protein, 10 aa, Fusobacterium nucleatum
SLNWTISGDI

SEQ ID NO: 2720 - protein, 10 aa, Fusobacterium nucleatum
QVNEPLPAPV

SEQ ID NO: 2721 - protein, 11 aa, Fusobacterium nucleatum
VKYSLGLAILF

SEQ ID NO: 2722 - protein, 9 aa, Fusobacterium nucleatum
ILATNSNLI

SEQ ID NO: 2723 - protein, 10 aa, Fusobacterium nucleatum
TRIDKGIGIY

SEQ ID NO: 2724 - protein, 10 aa, Fusobacterium nucleatum
NKTIKVTAES

SEQ ID NO: 2725 - protein, 11 aa, Fusobacterium nucleatum
SVGIYSKGNNK

SEQ ID NO: 2726 - protein, 10 aa, Fusobacterium nucleatum
DIDTHIATAK

SEQ ID NO: 2727 - protein, 9 aa, Fusobacterium nucleatum
KLTSIAGSL

SEQ ID NO: 2728 - protein, 11 aa, Fusobacterium nucleatum
ISGDIFVGYNK

SEQ ID NO: 2729 - protein, 8 aa, Fusobacterium nucleatum
MYAENTNL

SEQ ID NO: 2730 - protein, 10 aa, Fusobacterium nucleatum
GMYLTNAEKI

SEQ ID NO: 2731 - protein, 10 aa, Fusobacterium nucleatum
NFTNNGTIDF

SEQ ID NO: 2732 - protein, 8 aa, Fusobacterium nucleatum
TISVTAEK

SEQ ID NO: 2733 - protein, 10 aa, Fusobacterium nucleatum
KYLFNGIYTR

SEQ ID NO: 2734 - protein, 10 aa, Fusobacterium nucleatum
GNRSWGLVDL

SEQ ID NO: 2735 - protein, 9 aa, Fusobacterium nucleatum
GATQNTMLY

SEQ ID NO: 2736 - protein, 8 aa, Fusobacterium nucleatum
KESGKLTI

SEQ ID NO: 2737 - protein, 11 aa, Fusobacterium nucleatum
TSTGTISLENK

SEQ ID NO: 2738 - protein, 9 aa, Fusobacterium nucleatum
EPTNEVEIL

SEQ ID NO: 2739 - protein, 9 aa, Fusobacterium nucleatum
NAENSIGFY

SEQ ID NO: 2740 - protein, 11 aa, Fusobacterium nucleatum
NKNAVGILGSK

SEQ ID NO: 2741 - protein, 9 aa, Fusobacterium nucleatum
TVGKDGIAF

SEQ ID NO: 2742 - protein, 10 aa, Fusobacterium nucleatum
GILADKATGI

SEQ ID NO: 2743 - protein, 11 aa, Fusobacterium nucleatum
GTKGIEIVEKK

SEQ ID NO: 2744 - protein, 8 aa, Fusobacterium nucleatum
RYAVIKNY

SEQ ID NO: 2745 - protein, 8 aa, Fusobacterium nucleatum
LFNGIYTR

SEQ ID NO: 2746 - protein, 9 aa, Fusobacterium nucleatum
NSFEPAIGI

SEQ ID NO: 2747 - protein, 10 aa, Fusobacterium nucleatum
SFVNKTDNAW

SEQ ID NO: 2748 - protein, 8 aa, Fusobacterium nucleatum
MYLINAEK

SEQ ID NO: 2749 - protein, 9 aa, Fusobacterium nucleatum
SYAGRDGKV

SEQ ID NO: 2750 - protein, 11 aa, Fusobacterium nucleatum
KENIGLMAEGI

SEQ ID NO: 2751 - protein, 11 aa, Fusobacterium nucleatum
YVGKTDDIDPM

SEQ ID NO: 2752 - protein, 11 aa, Fusobacterium nucleatum
SNLGMSDIGFY

SEQ ID NO: 2753 - protein, 8 aa, Fusobacterium nucleatum
QMKAVPTR

SEQ ID NO: 2754 - protein, 9 aa, Fusobacterium nucleatum
GLDNQRLGV

SEQ ID NO: 2755 - protein, 9 aa, Fusobacterium nucleatum
STVTNKNII

SEQ ID NO: 2756 - protein, 9 aa, Fusobacterium nucleatum
KTITANGKK

SEQ ID NO: 2757 - protein, 9 aa, Fusobacterium nucleatum
NSNHLIAFY

SEQ ID NO: 2758 - protein, 10 aa, Fusobacterium nucleatum
MAEGIKNHSM

SEQ ID NO: 2759 - protein, 9 aa, Fusobacterium nucleatum
GMLGDKANI

SEQ ID NO: 2760 - protein, 9 aa, Fusobacterium nucleatum
AQGTAGTPY

SEQ ID NO: 2761 - protein, 9 aa, Fusobacterium nucleatum
VPFDENNSL

SEQ ID NO: 2762 - protein, 10 aa, Fusobacterium nucleatum
QLMEQGDQVV

SEQ ID NO: 2763 - protein, 9 aa, Fusobacterium nucleatum
ATFKNYGTI

SEQ ID NO: 2764 - protein, 10 aa, Fusobacterium nucleatum
MTGSPSVAMY

SEQ ID NO: 2765 - protein, 10 aa, Fusobacterium nucleatum
VFLYSNGKAI

SEQ ID NO: 2766 - protein, 10 aa, Fusobacterium nucleatum
VKKTDNAWNF

SEQ ID NO: 2767 - protein, 10 aa, Fusobacterium nucleatum
FHAKSKYYTY

SEQ ID NO: 2768 - protein, 10 aa, Fusobacterium nucleatum
VYVDDGAKFI

SEQ ID NO: 2769 - protein, 9 aa, Fusobacterium nucleatum
VTNSGKIEV

SEQ ID NO: 2770 - protein, 8 aa, Fusobacterium nucleatum
LEPTIGIY

SEQ ID NO: 2771 - protein, 10 aa, Fusobacterium nucleatum
SNKVKTFGMK

SEQ ID NO: 2772 - protein, 10 aa, Fusobacterium nucleatum
RTINANGASH

SEQ ID NO: 2773 - protein, 11 aa, Fusobacterium nucleatum
ASLFYATSKAK

SEQ ID NO: 2774 - protein, 9 aa, Fusobacterium nucleatum
MFAQAESGK

SEQ ID NO: 2775 - protein, 9 aa, Fusobacterium nucleatum
DNSYGVLIR

SEQ ID NO: 2776 - protein, 9 aa, Fusobacterium nucleatum
KGSQSFENK

SEQ ID NO: 2777 - protein, 9 aa, Fusobacterium nucleatum
IGIYGFYNK

SEQ ID NO: 2778 - protein, 11 aa, Fusobacterium nucleatum
QKYLFNGIYTR

SEQ ID NO: 2779 - protein, 9 aa, Fusobacterium nucleatum
FENKANINI

SEQ ID NO: 2780 - protein, 8 aa, Fusobacterium nucleatum
GEKAVGLY

SEQ ID NO: 2781 - protein, 9 aa, Fusobacterium nucleatum
NGASHLIAF

SEQ ID NO: 2782 - protein, 9 aa, Fusobacterium nucleatum
MMGHQYANV

SEQ ID NO: 2783 - protein, 10 aa, Fusobacterium nucleatum
GADIGKITGY

SEQ ID NO: 2784 - protein, 9 aa, Fusobacterium nucleatum
MVVNESTAV

SEQ ID NO: 2785 - protein, 8 aa, Fusobacterium nucleatum
GSKGSNLK

SEQ ID NO: 2786 - protein, 11 aa, Fusobacterium nucleatum
KMTGSPSVAMY

SEQ ID NO: 2787 - protein, 11 aa, Fusobacterium nucleatum
TGIVHNTFKFK

SEQ ID NO: 2788 - protein, 10 aa, Fusobacterium nucleatum
GIYNTGNINI

SEQ ID NO: 2789 - protein, 11 aa, Fusobacterium nucleatum
QQRVQATGIVL

SEQ ID NO: 2790 - protein, 9 aa, Fusobacterium nucleatum
GIDNQRLGV

SEQ ID NO: 2791 - protein, 9 aa, Fusobacterium nucleatum
LENSKFISH

SEQ ID NO: 2792 - protein, 11 aa, Fusobacterium nucleatum
KVYTDVSKIVY

SEQ ID NO: 2793 - protein, 10 aa, Fusobacterium nucleatum
VGIFVSETGV

SEQ ID NO: 2794 - protein, 9 aa, Fusobacterium nucleatum
EGNSTLTGV

SEQ ID NO: 2795 - protein, 11 aa, Fusobacterium nucleatum
SGRISLSNSSI

SEQ ID NO: 2796 - protein, 8 aa, Fusobacterium nucleatum
YVDDGAKF

SEQ ID NO: 2797 - protein, 11 aa, Fusobacterium nucleatum
GATQNTMLYLK

SEQ ID NO: 2798 - protein, 10 aa, Fusobacterium nucleatum
AKSKYYTYGI

SEQ ID NO: 2799 - protein, 10 aa, Fusobacterium nucleatum
TQDEESAGMY

SEQ ID NO: 2800 - protein, 11 aa, Fusobacterium nucleatum
GMYAKNDASNI

SEQ ID NO: 2801 - protein, 11 aa, Fusobacterium nucleatum
KESLIGMFAQA

SEQ ID NO: 2802 - protein, 10 aa, Fusobacterium nucleatum
INFTNTGNIY

SEQ ID NO: 2803 - protein, 9 aa, Fusobacterium nucleatum
NSVGGLQTK

SEQ ID NO: 2804 - protein, 9 aa, Fusobacterium nucleatum
NEPLPAPVI

SEQ ID NO: 2805 - protein, 11 aa, Fusobacterium nucleatum
SVGLYSKGQSY

SEQ ID NO: 2806 - protein, 9 aa, Fusobacterium nucleatum
TGNINVNSK

SEQ ID NO: 2807 - protein, 10 aa, Fusobacterium nucleatum
GSAGVLAEKY

SEQ ID NO: 2808 - protein, 11 aa, Fusobacterium nucleatum
VFLYSNGKANI

SEQ ID NO: 2809 - protein, 9 aa, Fusobacterium nucleatum
IETTSNSKI

SEQ ID NO: 2810 - protein, 10 aa, Fusobacterium nucleatum
RVANGKNKAK

SEQ ID NO: 2811 - protein, 9 aa, Fusobacterium nucleatum
SSTNGNRSW

SEQ ID NO: 2812 - protein, 10 aa, Fusobacterium nucleatum
SSNGGVKIDR

SEQ ID NO: 2813 - protein, 10 aa, Fusobacterium nucleatum
SWKDVSQAYI

SEQ ID NO: 2814 - protein, 10 aa, Fusobacterium nucleatum
RGILGVNSNF

SEQ ID NO: 2815 - protein, 9 aa, Fusobacterium nucleatum
ELQKQINSK

SEQ ID NO: 2816 - protein, 10 aa, Fusobacterium nucleatum
TVKEESSVGI

SEQ ID NO: 2817 - protein, 11 aa, Fusobacterium nucleatum
TVTNSPLLSKY

SEQ ID NO: 2818 - protein, 10 aa, Fusobacterium nucleatum
MMITNDTTGI

SEQ ID NO: 2819 - protein, 11 aa, Fusobacterium nucleatum
LFLMLGVSAFS

SEQ ID NO: 2820 - protein, 11 aa, Fusobacterium nucleatum
FLVVDEIFHAK

SEQ ID NO: 2821 - protein, 11 aa, Fusobacterium nucleatum
FLDQIQGRNFK

SEQ ID NO: 2822 - protein, 10 aa, Fusobacterium nucleatum
RGEIRTTDSY

SEQ ID NO: 2823 - protein, 10 aa, Fusobacterium nucleatum
RKFLVVDEIF

SEQ ID NO: 2824 - protein, 8 aa, Fusobacterium nucleatum
IELVGSNI

SEQ ID NO: 2825 - protein, 8 aa, Fusobacterium nucleatum
MLGEVKSL

SEQ ID NO: 2826 - protein, 8 aa, Fusobacterium nucleatum
FGKNSSTL

SEQ ID NO: 2827 - protein, 10 aa, Fusobacterium nucleatum
NTKDINVNTK

SEQ ID NO: 2828 - protein, 10 aa, Fusobacterium nucleatum
NGSSAVYVSK

SEQ ID NO: 2829 - protein, 11 aa, Fusobacterium nucleatum
RVYINANKNLK

SEQ ID NO: 2830 - protein, 10 aa, Fusobacterium nucleatum
YTYGIGVKNE

SEQ ID NO: 2831 - protein, 11 aa, Fusobacterium nucleatum
EVKHNDYLSIK

SEQ ID NO: 2832 - protein, 9 aa, Fusobacterium nucleatum
ITEPTVQTL

SEQ ID NO: 2833 - protein, 9 aa, Fusobacterium nucleatum
MYGEANSQL

SEQ ID NO: 2834 - protein, 10 aa, Fusobacterium nucleatum
LMEQGNQVVK

SEQ ID NO: 2835 - protein, 9 aa, Fusobacterium nucleatum
GASHLIAFY

SEQ ID NO: 2836 - protein, 9 aa, Fusobacterium nucleatum
TTFNGGNAT

SEQ ID NO: 2837 - protein, 11 aa, Fusobacterium nucleatum
GASHLIAFYIK

SEQ ID NO: 2838 - protein, 9 aa, Fusobacterium nucleatum
EMNGGKIHV

SEQ ID NO: 2839 - protein, 11 aa, Fusobacterium nucleatum
TADWFNIRGEK

SEQ ID NO: 2840 - protein, 10 aa, Fusobacterium nucleatum
AKLPYTSFVK

SEQ ID NO: 2841 - protein, 11 aa, Fusobacterium nucleatum
EIRTTDSYAGR

SEQ ID NO: 2842 - protein, 11 aa, Fusobacterium nucleatum
KVKSAVTASTA

SEQ ID NO: 2843 - protein, 10 aa, Fusobacterium nucleatum
STFGLLNGNK

SEQ ID NO: 2844 - protein, 10 aa, Fusobacterium nucleatum
EVKNEGSAGV

SEQ ID NO: 2845 - protein, 9 aa, Fusobacterium nucleatum
LGDASTGMY

SEQ ID NO: 2846 - protein, 11 aa, Fusobacterium nucleatum
DSALAGADIGK

SEQ ID NO: 2847 - protein, 9 aa, Fusobacterium nucleatum
APSAPSAPT

SEQ ID NO: 2848 - protein, 9 aa, Fusobacterium nucleatum
YYVNGKDSA

SEQ ID NO: 2849 - protein, 9 aa, Fusobacterium nucleatum
GMLGKVKSA

SEQ ID NO: 2850 - protein, 8 aa, Fusobacterium nucleatum
VEMNGGKI

SEQ ID NO: 2851 - protein, 9 aa, Fusobacterium nucleatum
ATNKGRILV

SEQ ID NO: 2852 - protein, 10 aa, Fusobacterium nucleatum
EIFHAKSKYY

SEQ ID NO: 2853 - protein, 9 aa, Fusobacterium nucleatum
LLQEIQEVK

SEQ ID NO: 2854 - protein, 11 aa, Fusobacterium nucleatum
AQAESGKTASV

SEQ ID NO: 2855 - protein, 9 aa, Fusobacterium nucleatum
KVRNAMDVA

SEQ ID NO: 2856 - protein, 9 aa, Fusobacterium nucleatum
DSKYTSGVY

SEQ ID NO: 2857 - protein, 11 aa, Fusobacterium nucleatum
NSKSSVGMLAK

SEQ ID NO: 2858 - protein, 9 aa, Fusobacterium nucleatum
GTELAYRHY

SEQ ID NO: 2859 - protein, 9 aa, Fusobacterium nucleatum
ETTGTITVS

SEQ ID NO: 2860 - protein, 8 aa, Fusobacterium nucleatum
LLQEIQEV

SEQ ID NO: 2861 - protein, 10 aa, Fusobacterium nucleatum
ATSPSDKAKY

SEQ ID NO: 2862 - protein, 10 aa, Fusobacterium nucleatum
GQITGVAMAK

SEQ ID NO: 2863 - protein, 9 aa, Fusobacterium nucleatum
IVTVFNKGV

SEQ ID NO: 2864 - protein, 9 aa, Fusobacterium nucleatum
NANGASHLI

SEQ ID NO: 2865 - protein, 10 aa, Fusobacterium nucleatum
KNEQTLLTQA

SEQ ID NO: 2866 - protein, 9 aa, Fusobacterium nucleatum
VKGDVIKPF

SEQ ID NO: 2867 - protein, 9 aa, Fusobacterium nucleatum
KSYGFILNN

SEQ ID NO: 2868 - protein, 10 aa, Fusobacterium nucleatum
SLEVAYENEL

SEQ ID NO: 2869 - protein, 9 aa, Fusobacterium nucleatum
GTITLKNSI

SEQ ID NO: 2870 - protein, 9 aa, Fusobacterium nucleatum
TATNKIQSM

SEQ ID NO: 2871 - protein, 9 aa, Fusobacterium nucleatum
YSNGKANII

SEQ ID NO: 2872 - protein, 11 aa, Fusobacterium nucleatum
RPLTPGNDSLN

SEQ ID NO: 2873 - protein, 10 aa, Fusobacterium nucleatum
WGLVDLENLR

SEQ ID NO: 2874 - protein, 10 aa, Fusobacterium nucleatum
EETSAGMLGK

SEQ ID NO: 2875 - protein, 11 aa, Fusobacterium nucleatum
MTGKVYSDVSK

SEQ ID NO: 2876 - protein, 9 aa, Fusobacterium nucleatum
IVNEGEIRI

SEQ ID NO: 2877 - protein, 10 aa, Fusobacterium nucleatum
NDTNGNITVK

SEQ ID NO: 2878 - protein, 9 aa, Fusobacterium nucleatum
VQTKLNVLR

SEQ ID NO: 2879 - protein, 9 aa, Fusobacterium nucleatum
VVKSPWSSW

SEQ ID NO: 2880 - protein, 10 aa, Fusobacterium nucleatum
NLTMTTAANI

SEQ ID NO: 2881 - protein, 10 aa, Fusobacterium nucleatum
WNFTDGLEQR

SEQ ID NO: 2882 - protein, 9 aa, Fusobacterium nucleatum
SNVEMNGGK

SEQ ID NO: 2883 - protein, 9 aa, Fusobacterium nucleatum
AMLGEVKSL

SEQ ID NO: 2884 - protein, 10 aa, Fusobacterium nucleatum
TGSAGIYSII

SEQ ID NO: 2885 - protein, 10 aa, Fusobacterium nucleatum
KVKSAVTAST

SEQ ID NO: 2886 - protein, 10 aa, Fusobacterium nucleatum
GTEFNGGTAT

SEQ ID NO: 2887 - protein, 11 aa, Fusobacterium nucleatum
VRNTVTNTGDI

SEQ ID NO: 2888 - protein, 9 aa, Fusobacterium nucleatum
VEYGRVSKI

SEQ ID NO: 2889 - protein, 9 aa, Fusobacterium nucleatum
VKIDRDNSI

SEQ ID NO: 2890 - protein, 9 aa, Fusobacterium nucleatum
LGRTKPIDI

SEQ ID NO: 2891 - protein, 10 aa, Fusobacterium nucleatum
TPYNITTPIT

SEQ ID NO: 2892 - protein, 10 aa, Fusobacterium nucleatum
KTITLSAKKS

SEQ ID NO: 2893 - protein, 10 aa, Fusobacterium nucleatum
SFGEGASLFY

SEQ ID NO: 2894 - protein, 9 aa, Fusobacterium nucleatum
EIFHAKSKY

SEQ ID NO: 2895 - protein, 10 aa, Fusobacterium nucleatum
ATPTVATDGV

SEQ ID NO: 2896 - protein, 10 aa, Fusobacterium nucleatum
EVRSEEGRVY

SEQ ID NO: 2897 - protein, 9 aa, Fusobacterium nucleatum
SLGDASTGM

SEQ ID NO: 2898 - protein, 9 aa, Fusobacterium nucleatum
GASIFYATL

SEQ ID NO: 2899 - protein, 9 aa, Fusobacterium nucleatum
SRNTTMSHM

SEQ ID NO: 2900 - protein, 9 aa, Fusobacterium nucleatum
VTGKTVTSV

SEQ ID NO: 2901 - protein, 9 aa, Fusobacterium nucleatum
LFYATSKAK

SEQ ID NO: 2902 - protein, 9 aa, Fusobacterium nucleatum
FYATSKAKA

SEQ ID NO: 2903 - protein, 11 aa, Fusobacterium nucleatum
ALEKKESVGMY

SEQ ID NO: 2904 - protein, 9 aa, Fusobacterium nucleatum
AYKHYFGTK

SEQ ID NO: 2905 - protein, 9 aa, Fusobacterium nucleatum
INVTANNNR

SEQ ID NO: 2906 - protein, 8 aa, Fusobacterium nucleatum
TGYGVGVY

SEQ ID NO: 2907 - protein, 10 aa, Fusobacterium nucleatum
KINSSSIANK

SEQ ID NO: 2908 - protein, 9 aa, Fusobacterium nucleatum
KFISHLGNL

SEQ ID NO: 2909 - protein, 9 aa, Fusobacterium nucleatum
GRGTGWYTG

SEQ ID NO: 2910 - protein, 9 aa, Fusobacterium nucleatum
APKANISKV

SEQ ID NO: 2911 - protein, 9 aa, Fusobacterium nucleatum
VGQKSIGIY

SEQ ID NO: 2912 - protein, 9 aa, Fusobacterium nucleatum
KIKTFGMKG

SEQ ID NO: 2913 - protein, 8 aa, Fusobacterium nucleatum
RNFKLTSI

SEQ ID NO: 2914 - protein, 9 aa, Fusobacterium nucleatum
RVQATGIVL

SEQ ID NO: 2915 - protein, 10 aa, Fusobacterium nucleatum
AGMYVENSSA

SEQ ID NO: 2916 - protein, 10 aa, Fusobacterium nucleatum
GVGIYKQNGK

SEQ ID NO: 2917 - protein, 11 aa, Fusobacterium nucleatum
TTVENTGKIYL

SEQ ID NO: 2918 - protein, 10 aa, Fusobacterium nucleatum
MTNEGSAAML

SEQ ID NO: 2919 - protein, 8 aa, Fusobacterium nucleatum
MNYFYDHW

SEQ ID NO: 2920 - protein, 10 aa, Fusobacterium nucleatum
TVTMGNDSVF

SEQ ID NO: 2921 - protein, 9 aa, Fusobacterium nucleatum
AVIKNYGEI

SEQ ID NO: 2922 - protein, 11 aa, Fusobacterium nucleatum
NGTVGFTSVAK

SEQ ID NO: 2923 - protein, 10 aa, Fusobacterium nucleatum
KSYGFILNNT

SEQ ID NO: 2924 - protein, 11 aa, Fusobacterium nucleatum
NIQGVGVYAKK

SEQ ID NO: 2925 - protein, 11 aa, Fusobacterium nucleatum
SIAQLDGAGTK

SEQ ID NO: 2926 - protein, 9 aa, Fusobacterium nucleatum
AGVYVKLDK

SEQ ID NO: 2927 - protein, 9 aa, Fusobacterium nucleatum
LDKEFSHLR

SEQ ID NO: 2928 - protein, 9 aa, Fusobacterium nucleatum
ITLENKEAV

SEQ ID NO: 2929 - protein, 8 aa, Fusobacterium nucleatum
LENHGKIL

SEQ ID NO: 2930 - protein, 9 aa, Fusobacterium nucleatum
NENVTGLVG

SEQ ID NO: 2931 - protein, 9 aa, Fusobacterium nucleatum
ETVGMMITN

SEQ ID NO: 2932 - protein, 9 aa, Fusobacterium nucleatum
YDEMMGHQY

SEQ ID NO: 2933 - protein, 10 aa, Fusobacterium nucleatum
KGSNLKNTGK

SEQ ID NO: 2934 - protein, 10 aa, Fusobacterium nucleatum
TDSNGSSAVY

SEQ ID NO: 2935 - protein, 11 aa, Fusobacterium nucleatum
TELAYKHYFGA

SEQ ID NO: 2936 - protein, 9 aa, Fusobacterium nucleatum
VTNTGDITV

SEQ ID NO: 2937 - protein, 9 aa, Fusobacterium nucleatum
SPKEVTKQA

SEQ ID NO: 2938 - protein, 9 aa, Fusobacterium nucleatum
SAVTASTAK

SEQ ID NO: 2939 - protein, 9 aa, Fusobacterium nucleatum
ASTNPDPNK

SEQ ID NO: 2940 - protein, 10 aa, Fusobacterium nucleatum
RIYNNKSIGM

SEQ ID NO: 2941 - protein, 11 aa, Fusobacterium nucleatum
IQLKPEDPHYW

SEQ ID NO: 2942 - protein, 9 aa, Fusobacterium nucleatum
KAKVAYTNA

SEQ ID NO: 2943 - protein, 10 aa, Fusobacterium nucleatum
GTWGISWKDV

SEQ ID NO: 2944 - protein, 9 aa, Fusobacterium nucleatum
SFGEGASIF

SEQ ID NO: 2945 - protein, 11 aa, Fusobacterium nucleatum
ISGDIFVGHNK

SEQ ID NO: 2946 - protein, 10 aa, Fusobacterium nucleatum
TFKIESGKTL

SEQ ID NO: 2947 - protein, 9 aa, Fusobacterium nucleatum
MLGEDSGTV

SEQ ID NO: 2948 - protein, 10 aa, Fusobacterium nucleatum
NSKEKQLQAK

SEQ ID NO: 2949 - protein, 9 aa, Fusobacterium nucleatum
KGIILAEKK

SEQ ID NO: 2950 - protein, 9 aa, Fusobacterium nucleatum
KMSGSPSVA

SEQ ID NO: 2951 - protein, 10 aa, Fusobacterium nucleatum
VGMAGKATTV

SEQ ID NO: 2952 - protein, 9 aa, Fusobacterium nucleatum
YVSKGGKVA

SEQ ID NO: 2953 - protein, 11 aa, Fusobacterium nucleatum
GKNSIGIYGFY

SEQ ID NO: 2954 - protein, 10 aa, Fusobacterium nucleatum
LVVDEIFHAK

SEQ ID NO: 2955 - protein, 9 aa, Fusobacterium nucleatum
YVDTLGRTK

SEQ ID NO: 2956 - protein, 10 aa, Fusobacterium nucleatum
STDSNGSSAV

SEQ ID NO: 2957 - protein, 9 aa, Fusobacterium nucleatum
AENSIGFYG

SEQ ID NO: 2958 - protein, 9 aa, Fusobacterium nucleatum
RVAGTTADW

SEQ ID NO: 2959 - protein, 11 aa, Fusobacterium nucleatum
EFRLSEGFSIR

SEQ ID NO: 2960 - protein, 10 aa, Fusobacterium nucleatum
VGMAGDNSTV

SEQ ID NO: 2961 - protein, 9 aa, Fusobacterium nucleatum
YTNADWFNI

SEQ ID NO: 2962 - protein, 9 aa, Fusobacterium nucleatum
SESGATKNV

SEQ ID NO: 2963 - protein, 10 aa, Fusobacterium nucleatum
GLLQEIQEVK

SEQ ID NO: 2964 - protein, 9 aa, Fusobacterium nucleatum
GIYSKGNNK

SEQ ID NO: 2965 - protein, 9 aa, Fusobacterium nucleatum
RIFNKLNGI

SEQ ID NO: 2966 - protein, 10 aa, Fusobacterium nucleatum
ANNSNHLIAF

SEQ ID NO: 2967 - protein, 10 aa, Fusobacterium nucleatum
KGVGTTVENK

SEQ ID NO: 2968 - protein, 9 aa, Fusobacterium nucleatum
EINDQASKI

SEQ ID NO: 2969 - protein, 10 aa, Fusobacterium nucleatum
IKLGRGTGWY

SEQ ID NO: 2970 - protein, 11 aa, Fusobacterium nucleatum
KINLGKVNQNR

SEQ ID NO: 2971 - protein, 11 aa, Fusobacterium nucleatum
GEIKVRGKGTW

SEQ ID NO: 2972 - protein, 10 aa, Fusobacterium nucleatum
KVYSDVSKIV

SEQ ID NO: 2973 - protein, 11 aa, Fusobacterium nucleatum
KINLGTVNQNR

SEQ ID NO: 2974 - protein, 9 aa, Fusobacterium nucleatum
VEKDLRSIA

SEQ ID NO: 2975 - protein, 9 aa, Fusobacterium nucleatum
TPTVATDGV

SEQ ID NO: 2976 - protein, 10 aa, Fusobacterium nucleatum
EEIVSSKENL

SEQ ID NO: 2977 - protein, 9 aa, Fusobacterium nucleatum
DNSYGVIIR

SEQ ID NO: 2978 - protein, 11 aa, Fusobacterium nucleatum
TWIATPVLDNY

SEQ ID NO: 2979 - protein, 9 aa, Fusobacterium nucleatum
AYRHYFGIK

SEQ ID NO: 2980 - protein, 10 aa, Fusobacterium nucleatum
APSAPTAPSA

SEQ ID NO: 2981 - protein, 9 aa, Fusobacterium nucleatum
GLAILFLML

SEQ ID NO: 2982 - protein, 9 aa, Fusobacterium nucleatum
FGEDNSTLL

SEQ ID NO: 2983 - protein, 11 aa, Fusobacterium nucleatum
DMFVGYNKMHR

SEQ ID NO: 2984 - protein, 10 aa, Fusobacterium nucleatum
VSLGNDSVFL

SEQ ID NO: 2985 - protein, 11 aa, Fusobacterium nucleatum
IVTVFNKGVPK

SEQ ID NO: 2986 - protein, 8 aa, Fusobacterium nucleatum
AENKGIIL

SEQ ID NO: 2987 - protein, 10 aa, Fusobacterium nucleatum
EGNSTLTGVK

SEQ ID NO: 2988 - protein, 9 aa, Fusobacterium nucleatum
SYGVLIRGK

SEQ ID NO: 2989 - protein, 10 aa, Fusobacterium nucleatum
VYVDDGATFK

SEQ ID NO: 2990 - protein, 11 aa, Fusobacterium nucleatum
DTINVNGKESL

SEQ ID NO: 2991 - protein, 10 aa, Fusobacterium nucleatum
KRYKSVKYSL

SEQ ID NO: 2992 - protein, 11 aa, Fusobacterium nucleatum
GKVTLGTNTIK

SEQ ID NO: 2993 - protein, 9 aa, Fusobacterium nucleatum
KLEVKHNDY

SEQ ID NO: 2994 - protein, 11 aa, Fusobacterium nucleatum
STSHESLIGMF

SEQ ID NO: 2995 - protein, 8 aa, Fusobacterium nucleatum
NHLIAFYI

SEQ ID NO: 2996 - protein, 10 aa, Fusobacterium nucleatum
GEGASIFYAT

SEQ ID NO: 2997 - protein, 9 aa, Fusobacterium nucleatum
TATIELEGK

SEQ ID NO: 2998 - protein, 8 aa, Fusobacterium nucleatum
TELAYKHY

SEQ ID NO: 2999 - protein, 9 aa, Fusobacterium nucleatum
IYSDGDTKV

SEQ ID NO: 3000 - protein, 8 aa, Fusobacterium nucleatum
RENLRNSV

SEQ ID NO: 3001 - protein, 9 aa, Fusobacterium nucleatum
GIVHNTFKF

SEQ ID NO: 3002 - protein, 10 aa, Fusobacterium nucleatum
ELVGSNIQGV

SEQ ID NO: 3003 - protein, 10 aa, Fusobacterium nucleatum
EVNTEQMKAV

SEQ ID NO: 3004 - protein, 11 aa, Fusobacterium nucleatum
YIDADNSYGVL

SEQ ID NO: 3005 - protein, 8 aa, Fusobacterium nucleatum
ISIGAKSY

SEQ ID NO: 3006 - protein, 9 aa, Fusobacterium nucleatum
KESLIGMFA

SEQ ID NO: 3007 - protein, 10 aa, Fusobacterium nucleatum
FGMNYFYDHW

SEQ ID NO: 3008 - protein, 10 aa, Fusobacterium nucleatum
KIYIDADNSY

SEQ ID NO: 3009 - protein, 8 aa, Fusobacterium nucleatum
ATDKIQSM

SEQ ID NO: 3010 - protein, 8 aa, Fusobacterium nucleatum
IYAKETSI

SEQ ID NO: 3011 - protein, 9 aa, Fusobacterium nucleatum
ETNTNAGLI

SEQ ID NO: 3012 - protein, 9 aa, Fusobacterium nucleatum
VHENEDIKL

SEQ ID NO: 3013 - protein, 11 aa, Fusobacterium nucleatum
GTVSLGNDSVF

SEQ ID NO: 3014 - protein, 10 aa, Fusobacterium nucleatum
ETSIVTGKTV

SEQ ID NO: 3015 - protein, 11 aa, Fusobacterium nucleatum
KEQIAFGFNNA

SEQ ID NO: 3016 - protein, 10 aa, Fusobacterium nucleatum
NKTITLSGEK

SEQ ID NO: 3017 - protein, 10 aa, Fusobacterium nucleatum
NAMDVAENQR

SEQ ID NO: 3018 - protein, 9 aa, Fusobacterium nucleatum
RKYDGASTN

SEQ ID NO: 3019 - protein, 9 aa, Fusobacterium nucleatum
NSKISLSGA

SEQ ID NO: 3020 - protein, 11 aa, Fusobacterium nucleatum
TIDLNSGATNK

SEQ ID NO: 3021 - protein, 9 aa, Fusobacterium nucleatum
AQKASAGIY

SEQ ID NO: 3022 - protein, 8 aa, Fusobacterium nucleatum
TTAANIAL

SEQ ID NO: 3023 - protein, 9 aa, Fusobacterium nucleatum
GQITGVAMA

SEQ ID NO: 3024 - protein, 9 aa, Fusobacterium nucleatum
STFGLLNGN

SEQ ID NO: 3025 - protein, 11 aa, Fusobacterium nucleatum
KEKIKNLRLEL

SEQ ID NO: 3026 - protein, 11 aa, Fusobacterium nucleatum
DIFIGHNKLER

SEQ ID NO: 3027 - protein, 9 aa, Fusobacterium nucleatum
AQVDDQASK

SEQ ID NO: 3028 - protein, 10 aa, Fusobacterium nucleatum
ANSFEPAIGI

SEQ ID NO: 3029 - protein, 10 aa, Fusobacterium nucleatum
ARISPKEVTK

SEQ ID NO: 3030 - protein, 10 aa, Fusobacterium nucleatum
NSANSFEPAI

SEQ ID NO: 3031 - protein, 10 aa, Fusobacterium nucleatum
YSKGQSYTVR

SEQ ID NO: 3032 - protein, 10 aa, Fusobacterium nucleatum
TKKSVGMYAK

SEQ ID NO: 3033 - protein, 9 aa, Fusobacterium nucleatum
GVIDYKYNA

SEQ ID NO: 3034 - protein, 9 aa, Fusobacterium nucleatum
WQEGNFEAV

SEQ ID NO: 3035 - protein, 9 aa, Fusobacterium nucleatum
GENDASGEI

SEQ ID NO: 3036 - protein, 10 aa, Fusobacterium nucleatum
AMDVAENQRV

SEQ ID NO: 3037 - protein, 9 aa, Fusobacterium nucleatum
NEGSAGVLA

SEQ ID NO: 3038 - protein, 8 aa, Fusobacterium nucleatum
YYTYGIGV

SEQ ID NO: 3039 - protein, 8 aa, Fusobacterium nucleatum
YSNGKAII

SEQ ID NO: 3040 - protein, 10 aa, Fusobacterium nucleatum
LMAEGIKNHS

SEQ ID NO: 3041 - protein, 10 aa, Fusobacterium nucleatum
NKNLKPRMVL

SEQ ID NO: 3042 - protein, 11 aa, Fusobacterium nucleatum
KLELETTSNSK

SEQ ID NO: 3043 - protein, 11 aa, Fusobacterium nucleatum
GLYSKGQSYTV

SEQ ID NO: 3044 - protein, 11 aa, Fusobacterium nucleatum
AWNFTDGLEQR

SEQ ID NO: 3045 - protein, 10 aa, Fusobacterium nucleatum
NVEIASGKTL

SEQ ID NO: 3046 - protein, 10 aa, Fusobacterium nucleatum
SENEKALKGL

SEQ ID NO: 3047 - protein, 9 aa, Fusobacterium nucleatum
MFINSARGK

SEQ ID NO: 3048 - protein, 10 aa, Fusobacterium nucleatum
SNAESITGTK

SEQ ID NO: 3049 - protein, 9 aa, Fusobacterium nucleatum
SALTGVKTI

SEQ ID NO: 3050 - protein, 9 aa, Fusobacterium nucleatum
YATLKAKAI

SEQ ID NO: 3051 - protein, 10 aa, Fusobacterium nucleatum
RVANGKNKAR

SEQ ID NO: 3052 - protein, 8 aa, Fusobacterium nucleatum
YSKTPSSV

SEQ ID NO: 3053 - protein, 10 aa, Fusobacterium nucleatum
AVNPQVNEPL

SEQ ID NO: 3054 - protein, 10 aa, Fusobacterium nucleatum
SIAKRYKSVK

SEQ ID NO: 3055 - protein, 10 aa, Fusobacterium nucleatum
TAGTGIFITK

SEQ ID NO: 3056 - protein, 11 aa, Fusobacterium nucleatum
VPFDDNNSLNW

SEQ ID NO: 3057 - protein, 9 aa, Fusobacterium nucleatum
TSIVTGKTV

SEQ ID NO: 3058 - protein, 10 aa, Fusobacterium nucleatum
GETDIQSYIK

SEQ ID NO: 3059 - protein, 11 aa, Fusobacterium nucleatum
NTKDININTKK

SEQ ID NO: 3060 - protein, 8 aa, Fusobacterium nucleatum
LMLGVSAF

SEQ ID NO: 3061 - protein, 9 aa, Fusobacterium nucleatum
KPEVGTELA

SEQ ID NO: 3062 - protein, 11 aa, Fusobacterium nucleatum
TAKDSEPTGVY

SEQ ID NO: 3063 - protein, 10 aa, Fusobacterium nucleatum
GLAGVAVMNG

SEQ ID NO: 3064 - protein, 10 aa, Fusobacterium nucleatum
QGRNFKLTSI

SEQ ID NO: 3065 - protein, 8 aa, Fusobacterium nucleatum
ETSIVTGK

SEQ ID NO: 3066 - protein, 9 aa, Fusobacterium nucleatum
KIREKSGEV

SEQ ID NO: 3067 - protein, 11 aa, Fusobacterium nucleatum
ADPTKFNNTFK

SEQ ID NO: 3068 - protein, 9 aa, Fusobacterium nucleatum
ERYAVIKNY

SEQ ID NO: 3069 - protein, 10 aa, Fusobacterium nucleatum
FVKGDVIKPF

SEQ ID NO: 3070 - protein, 10 aa, Fusobacterium nucleatum
QESAGIYAPK

SEQ ID NO: 3071 - protein, 11 aa, Fusobacterium nucleatum
LENKEAVGIFA

SEQ ID NO: 3072 - protein, 9 aa, Fusobacterium nucleatum
VGISLNNSK

SEQ ID NO: 3073 - protein, 9 aa, Fusobacterium nucleatum
YNNKSIGMY

SEQ ID NO: 3074 - protein, 9 aa, Fusobacterium nucleatum
YSKKEGGAK

SEQ ID NO: 3075 - protein, 10 aa, Fusobacterium nucleatum
AGKSGVGIFA

SEQ ID NO: 3076 - protein, 10 aa, Fusobacterium nucleatum
TIENTGNIEV

SEQ ID NO: 3077 - protein, 10 aa, Fusobacterium nucleatum
RHYFGTKTLR

SEQ ID NO: 3078 - protein, 9 aa, Fusobacterium nucleatum
ASLFYATSK

SEQ ID NO: 3079 - protein, 11 aa, Fusobacterium nucleatum
AYDEMMGHQYA

SEQ ID NO: 3080 - protein, 11 aa, Fusobacterium nucleatum
STDSNGSSAVY

SEQ ID NO: 3081 - protein, 11 aa, Fusobacterium nucleatum
GLRLELIQLME

SEQ ID NO: 3082 - protein, 10 aa, Fusobacterium nucleatum
LKGETDIQSY

SEQ ID NO: 3083 - protein, 10 aa, Fusobacterium nucleatum
LAYRHYFGTK

SEQ ID NO: 3084 - protein, 9 aa, Fusobacterium nucleatum
AGKSGVGIF

SEQ ID NO: 3085 - protein, 8 aa, Fusobacterium nucleatum
YAKKGSTV

SEQ ID NO: 3086 - protein, 11 aa, Fusobacterium nucleatum
MAGKATTVTNK

SEQ ID NO: 3087 - protein, 10 aa, Fusobacterium nucleatum
GTNGIIVSAK

SEQ ID NO: 3088 - protein, 11 aa, Fusobacterium nucleatum
KEFRLSEGFSI

SEQ ID NO: 3089 - protein, 10 aa, Fusobacterium nucleatum
GIYSNAGSGK

SEQ ID NO: 3090 - protein, 10 aa, Fusobacterium nucleatum
YLNNNTSDKI

SEQ ID NO: 3091 - protein, 10 aa, Fusobacterium nucleatum
IGLLQEIQEV

SEQ ID NO: 3092 - protein, 10 aa, Fusobacterium nucleatum
AVINSGRISL

SEQ ID NO: 3093 - protein, 9 aa, Fusobacterium nucleatum
KEYIVGMAG

SEQ ID NO: 3094 - protein, 8 aa, Fusobacterium nucleatum
AKSKYYTY

SEQ ID NO: 3095 - protein, 10 aa, Fusobacterium nucleatum
LENEKALKGL

SEQ ID NO: 3096 - protein, 10 aa, Fusobacterium nucleatum
FLVVDEIFHA

SEQ ID NO: 3097 - protein, 10 aa, Fusobacterium nucleatum
YRHYFGIKTL

SEQ ID NO: 3098 - protein, 11 aa, Fusobacterium nucleatum
KLIGKESNLGM

SEQ ID NO: 3099 - protein, 11 aa, Fusobacterium nucleatum
ATNKGTIITEK

SEQ ID NO: 3100 - protein, 10 aa, Fusobacterium nucleatum
GILANKATGI

SEQ ID NO: 3101 - protein, 10 aa, Fusobacterium nucleatum
VKSPWSSWQF

SEQ ID NO: 3102 - protein, 11 aa, Fusobacterium nucleatum
AYYVNGKDSAL

SEQ ID NO: 3103 - protein, 9 aa, Fusobacterium nucleatum
NLGTVNQNR

SEQ ID NO: 3104 - protein, 9 aa, Fusobacterium nucleatum
IYTRGNWKV

SEQ ID NO: 3105 - protein, 9 aa, Fusobacterium nucleatum
KGIEIVEKK

SEQ ID NO: 3106 - protein, 9 aa, Fusobacterium nucleatum
VKFGTGSKL

SEQ ID NO: 3107 - protein, 11 aa, Fusobacterium nucleatum
GKILIDADNSY

SEQ ID NO: 3108 - protein, 9 aa, Fusobacterium nucleatum
GMAGDSSTV

SEQ ID NO: 3109 - protein, 9 aa, Fusobacterium nucleatum
AENGVGIFV

SEQ ID NO: 3110 - protein, 11 aa, Fusobacterium nucleatum
ATNKIQSMTGV

SEQ ID NO: 3111 - protein, 8 aa, Fusobacterium nucleatum
KVGNTVPR

SEQ ID NO: 3112 - protein, 9 aa, Fusobacterium nucleatum
IDADNSYGV

SEQ ID NO: 3113 - protein, 9 aa, Fusobacterium nucleatum
IRPEIGTEL

SEQ ID NO: 3114 - protein, 10 aa, Fusobacterium nucleatum
FNGIYTRGNW

SEQ ID NO: 3115 - protein, 9 aa, Fusobacterium nucleatum
NSANSFEPA

SEQ ID NO: 3116 - protein, 9 aa, Fusobacterium nucleatum
AYIEGNSTL

SEQ ID NO: 3117 - protein, 10 aa, Fusobacterium nucleatum
AMLGEVKSLV

SEQ ID NO: 3118 - protein, 9 aa, Fusobacterium nucleatum
YGKGVGTTV

SEQ ID NO: 3119 - protein, 11 aa, Fusobacterium nucleatum
SWTGIPTTVNV

SEQ ID NO: 3120 - protein, 9 aa, Fusobacterium nucleatum
IRIYNNKSI

SEQ ID NO: 3121 - protein, 8 aa, Fusobacterium nucleatum
RVSKIREK

SEQ ID NO: 3122 - protein, 10 aa, Fusobacterium nucleatum
EEALLTQAYD

SEQ ID NO: 3123 - protein, 10 aa, Fusobacterium nucleatum
SPWSSWQFGM

SEQ ID NO: 3124 - protein, 9 aa, Fusobacterium nucleatum
IATPVLDNY

SEQ ID NO: 3125 - protein, 11 aa, Fusobacterium nucleatum
INLGNGSVGLY

SEQ ID NO: 3126 - protein, 11 aa, Fusobacterium nucleatum
SEGTEFNGGTA

SEQ ID NO: 3127 - protein, 9 aa, Fusobacterium nucleatum
AEKKKSAGM

SEQ ID NO: 3128 - protein, 11 aa, Fusobacterium nucleatum
SIATGKTVTSV

SEQ ID NO: 3129 - protein, 9 aa, Fusobacterium nucleatum
VGIYKQNGK

SEQ ID NO: 3130 - protein, 9 aa, Fusobacterium nucleatum
SIGKRSLGM

SEQ ID NO: 3131 - protein, 11 aa, Fusobacterium nucleatum
KYSLGLAILFL

SEQ ID NO: 3132 - protein, 9 aa, Fusobacterium nucleatum
VYVSKGGKV

SEQ ID NO: 3133 - protein, 11 aa, Fusobacterium nucleatum
QQRVQATGNIL

SEQ ID NO: 3134 - protein, 10 aa, Fusobacterium nucleatum
KDNIGILANK

SEQ ID NO: 3135 - protein, 9 aa, Fusobacterium nucleatum
IFNAKSKYY

SEQ ID NO: 3136 - protein, 9 aa, Fusobacterium nucleatum
LAYRHYFGI

SEQ ID NO: 3137 - protein, 11 aa, Fusobacterium nucleatum
AFGFNNADASR

SEQ ID NO: 3138 - protein, 11 aa, Fusobacterium nucleatum
SMTGVYVDDGA

SEQ ID NO: 3139 - protein, 9 aa, Fusobacterium nucleatum
MLYLKNSIA

SEQ ID NO: 3140 - protein, 10 aa, Fusobacterium nucleatum
LKAESGIGML

SEQ ID NO: 3141 - protein, 9 aa, Fusobacterium nucleatum
QSFENKANI

SEQ ID NO: 3142 - protein, 10 aa, Fusobacterium nucleatum
DVADGYTGAY

SEQ ID NO: 3143 - protein, 11 aa, Fusobacterium nucleatum
KESAGVYAPKA

SEQ ID NO: 3144 - protein, 11 aa, Fusobacterium nucleatum
RRGNVKFDLNV

SEQ ID NO: 3145 - protein, 10 aa, Fusobacterium nucleatum
ENKEKIKNLR

SEQ ID NO: 3146 - protein, 11 aa, Fusobacterium nucleatum
ANNSNHLIAFY

SEQ ID NO: 3147 - protein, 8 aa, Fusobacterium nucleatum
TELAYRHY

SEQ ID NO: 3148 - protein, 10 aa, Fusobacterium nucleatum
SSDPEGQALR

SEQ ID NO: 3149 - protein, 10 aa, Fusobacterium nucleatum
LSEDFSIRPY

SEQ ID NO: 3150 - protein, 9 aa, Fusobacterium nucleatum
KEKSGEVRL

SEQ ID NO: 3151 - protein, 10 aa, Fusobacterium nucleatum
SSNGTTIGIY

SEQ ID NO: 3152 - protein, 8 aa, Fusobacterium nucleatum
YANVQQRV

SEQ ID NO: 3153 - protein, 10 aa, Fusobacterium nucleatum
NSIGIYGFYN

SEQ ID NO: 3154 - protein, 9 aa, Fusobacterium nucleatum
LKNTGKIEL

SEQ ID NO: 3155 - protein, 10 aa, Fusobacterium nucleatum
KVADTASAKI

SEQ ID NO: 3156 - protein, 9 aa, Fusobacterium nucleatum
AKYAIGIYA

SEQ ID NO: 3157 - protein, 11 aa, Fusobacterium nucleatum
STRIDKGIGIY

SEQ ID NO: 3158 - protein, 10 aa, Fusobacterium nucleatum
STSHESLIGM

SEQ ID NO: 3159 - protein, 9 aa, Fusobacterium nucleatum
TSIATGKTV

SEQ ID NO: 3160 - protein, 9 aa, Fusobacterium nucleatum
RSNPSDKDK

SEQ ID NO: 3161 - protein, 10 aa, Fusobacterium nucleatum
NWTISGDIFV

SEQ ID NO: 3162 - protein, 11 aa, Fusobacterium nucleatum
KVEYGRVSKIK

SEQ ID NO: 3163 - protein, 10 aa, Fusobacterium nucleatum
GIVHNTFKFK

SEQ ID NO: 3164 - protein, 9 aa, Fusobacterium nucleatum
AQLDGAGTK

SEQ ID NO: 3165 - protein, 9 aa, Fusobacterium nucleatum
VHINGNKNL

SEQ ID NO: 3166 - protein, 8 aa, Fusobacterium nucleatum
MFVGYNKM

SEQ ID NO: 3167 - protein, 10 aa, Fusobacterium nucleatum
STGTISLENK

SEQ ID NO: 3168 - protein, 10 aa, Fusobacterium nucleatum
TNIALGNGSV

SEQ ID NO: 3169 - protein, 10 aa, Fusobacterium nucleatum
IFNKLNGIGK

SEQ ID NO: 3170 - protein, 10 aa, Fusobacterium nucleatum
SVNDGSITAK

SEQ ID NO: 3171 - protein, 8 aa, Fusobacterium nucleatum
SKYTSGVY

SEQ ID NO: 3172 - protein, 10 aa, Fusobacterium nucleatum
TKDSEPTGVY

SEQ ID NO: 3173 - protein, 8 aa, Fusobacterium nucleatum
GTGIFITK

SEQ ID NO: 3174 - protein, 9 aa, Fusobacterium nucleatum
LVANDGANV

SEQ ID NO: 3175 - protein, 9 aa, Fusobacterium nucleatum
ITGYGVGVY

SEQ ID NO: 3176 - protein, 10 aa, Fusobacterium nucleatum
IKTFGMKGEY

SEQ ID NO: 3177 - protein, 8 aa, Fusobacterium nucleatum
KEAVGIFA

SEQ ID NO: 3178 - protein, 8 aa, Fusobacterium nucleatum
DIFIGHNK

SEQ ID NO: 3179 - protein, 11 aa, Fusobacterium nucleatum
VRNSVTNTGNI

SEQ ID NO: 3180 - protein, 9 aa, Fusobacterium nucleatum
NSNLTNNSK

SEQ ID NO: 3181 - protein, 9 aa, Fusobacterium nucleatum
TGNVGYDTK

SEQ ID NO: 3182 - protein, 10 aa, Fusobacterium nucleatum
KIQSMTGVYV

SEQ ID NO: 3183 - protein, 8 aa, Fusobacterium nucleatum
YTDVSKIV

SEQ ID NO: 3184 - protein, 10 aa, Fusobacterium nucleatum
AYIDELQKQI

SEQ ID NO: 3185 - protein, 10 aa, Fusobacterium nucleatum
EIVEKKSAGI

SEQ ID NO: 3186 - protein, 9 aa, Fusobacterium nucleatum
ENKESVGIF

SEQ ID NO: 3187 - protein, 11 aa, Fusobacterium nucleatum
TTSEIIVNKEA

SEQ ID NO: 3188 - protein, 10 aa, Fusobacterium nucleatum
ESAVINSGRI

SEQ ID NO: 3189 - protein, 11 aa, Fusobacterium nucleatum
KSVPFDENNSL

SEQ ID NO: 3190 - protein, 11 aa, Fusobacterium nucleatum
AINGTVGFTSV

SEQ ID NO: 3191 - protein, 11 aa, Fusobacterium nucleatum
IGIYSNAGSGK

SEQ ID NO: 3192 - protein, 11 aa, Fusobacterium nucleatum
ANVEIASGKKL

SEQ ID NO: 3193 - protein, 11 aa, Fusobacterium nucleatum
GRPLTPGNDSL

SEQ ID NO: 3194 - protein, 10 aa, Fusobacterium nucleatum
GTITTTDSYA

SEQ ID NO: 3195 - protein, 10 aa, Fusobacterium nucleatum
LENSKFVSHL

SEQ ID NO: 3196 - protein, 10 aa, Fusobacterium nucleatum
NGTVGFTSVA

SEQ ID NO: 3197 - protein, 9 aa, Fusobacterium nucleatum
HYFGTKTLR

SEQ ID NO: 3198 - protein, 10 aa, Fusobacterium nucleatum
YAIGIYADAQ

SEQ ID NO: 3199 - protein, 9 aa, Fusobacterium nucleatum
MTWQEGNFE

SEQ ID NO: 3200 - protein, 9 aa, Fusobacterium nucleatum
SEDFSIRPY

SEQ ID NO: 3201 - protein, 9 aa, Fusobacterium nucleatum
KTLGVFLKG

SEQ ID NO: 3202 - protein, 9 aa, Fusobacterium nucleatum
LRTSLEVAY

SEQ ID NO: 3203 - protein, 9 aa, Fusobacterium nucleatum
SSDPEGQAL

SEQ ID NO: 3204 - protein, 9 aa, Fusobacterium nucleatum
ALGNGSVGL

SEQ ID NO: 3205 - protein, 8 aa, Fusobacterium nucleatum
QTKLNVLR

SEQ ID NO: 3206 - protein, 9 aa, Fusobacterium nucleatum
TLGTNTIKL

SEQ ID NO: 3207 - protein, 9 aa, Fusobacterium nucleatum
IAENKGIIL

SEQ ID NO: 3208 - protein, 9 aa, Fusobacterium nucleatum
GEIKVDAAY

SEQ ID NO: 3209 - protein, 10 aa, Fusobacterium nucleatum
GSTQNTMLYL

SEQ ID NO: 3210 - protein, 9 aa, Fusobacterium nucleatum
MYLTNAEKI

SEQ ID NO: 3211 - protein, 11 aa, Fusobacterium nucleatum
KADGSTIKESL

SEQ ID NO: 3212 - protein, 10 aa, Fusobacterium nucleatum
ATREELKTSV

SEQ ID NO: 3213 - protein, 10 aa, Fusobacterium nucleatum
TMTNEGSAAM

SEQ ID NO: 3214 - protein, 9 aa, Fusobacterium nucleatum
YAKETSISS

SEQ ID NO: 3215 - protein, 9 aa, Fusobacterium nucleatum
QGVGVYAKK

SEQ ID NO: 3216 - protein, 8 aa, Fusobacterium nucleatum
ILDEDYKV

SEQ ID NO: 3217 - protein, 11 aa, Fusobacterium nucleatum
LFNGIYTRGNW

SEQ ID NO: 3218 - protein, 9 aa, Fusobacterium nucleatum
QLMEQGDQV

SEQ ID NO: 3219 - protein, 10 aa, Fusobacterium nucleatum
VATSIGKRSL

SEQ ID NO: 3220 - protein, 9 aa, Fusobacterium nucleatum
GINEKNINV

SEQ ID NO: 3221 - protein, 10 aa, Fusobacterium nucleatum
IEVGEKSIGI

SEQ ID NO: 3222 - protein, 10 aa, Fusobacterium nucleatum
AKFINRGEIR

SEQ ID NO: 3223 - protein, 10 aa, Fusobacterium nucleatum
ATLDSNTSKL

SEQ ID NO: 3224 - protein, 10 aa, Fusobacterium nucleatum
DILAENGVGI

SEQ ID NO: 3225 - protein, 9 aa, Fusobacterium nucleatum
VQTLEAPAV

SEQ ID NO: 3226 - protein, 11 aa, Fusobacterium nucleatum
SEGFSIRPYGA

SEQ ID NO: 3227 - protein, 10 aa, Fusobacterium nucleatum
ASKISIGAKS

SEQ ID NO: 3228 - protein, 10 aa, Fusobacterium nucleatum
NLGSTQNTML

SEQ ID NO: 3229 - protein, 9 aa, Fusobacterium nucleatum
KLIGKESNL

SEQ ID NO: 3230 - protein, 10 aa, Fusobacterium nucleatum
KYSLGLAILF

SEQ ID NO: 3231 - protein, 11 aa, Fusobacterium nucleatum
ISGDMFVGYNK

SEQ ID NO: 3232 - protein, 9 aa, Fusobacterium nucleatum
TVTMGNDSV

SEQ ID NO: 3233 - protein, 10 aa, Fusobacterium nucleatum
TGMYLINAEK

SEQ ID NO: 3234 - protein, 9 aa, Fusobacterium nucleatum
VGYNKMHRK

SEQ ID NO: 3235 - protein, 9 aa, Fusobacterium nucleatum
DPTKFNNTF

SEQ ID NO: 3236 - protein, 11 aa, Fusobacterium nucleatum
GSEIINSGIIK

SEQ ID NO: 3237 - protein, 11 aa, Fusobacterium nucleatum
GLIAINGTVGF

SEQ ID NO: 3238 - protein, 11 aa, Fusobacterium nucleatum
SNLGLSDIGFY

SEQ ID NO: 3239 - protein, 11 aa, Fusobacterium nucleatum
IRPEIGTELAY

SEQ ID NO: 3240 - protein, 9 aa, Fusobacterium nucleatum
ESVGMYSSS

SEQ ID NO: 3241 - protein, 9 aa, Fusobacterium nucleatum
GRNFKLTSI

SEQ ID NO: 3242 - protein, 10 aa, Fusobacterium nucleatum
KVEKDLRSIA

SEQ ID NO: 3243 - protein, 8 aa, Fusobacterium nucleatum
SIGIYGFY

SEQ ID NO: 3244 - protein, 9 aa, Fusobacterium nucleatum
LEKQINDKI

SEQ ID NO: 3245 - protein, 9 aa, Fusobacterium nucleatum
WFVKGDVIK

SEQ ID NO: 3246 - protein, 9 aa, Fusobacterium nucleatum
IPNSNVKAL

SEQ ID NO: 3247 - protein, 10 aa, Fusobacterium nucleatum
FKLTSIAGSL

SEQ ID NO: 3248 - protein, 10 aa, Fusobacterium nucleatum
YSEKTNKKQW

SEQ ID NO: 3249 - protein, 9 aa, Fusobacterium nucleatum
NTGSGTNGI

SEQ ID NO: 3250 - protein, 11 aa, Fusobacterium nucleatum
HAKSKYYTYGI

SEQ ID NO: 3251 - protein, 10 aa, Fusobacterium nucleatum
VKEESSVGIY

SEQ ID NO: 3252 - protein, 9 aa, Fusobacterium nucleatum
EKAVGLYSA

SEQ ID NO: 3253 - protein, 8 aa, Fusobacterium nucleatum
IKTLRTSL

SEQ ID NO: 3254 - protein, 9 aa, Fusobacterium nucleatum
ALAGADIGK

SEQ ID NO: 3255 - protein, 9 aa, Fusobacterium nucleatum
ATLDSNTSK

SEQ ID NO: 3256 - protein, 9 aa, Fusobacterium nucleatum
EIKADGDGK

SEQ ID NO: 3257 - protein, 8 aa, Fusobacterium nucleatum
VFAGVPTM

SEQ ID NO: 3258 - protein, 9 aa, Fusobacterium nucleatum
KDSEPTAVY

SEQ ID NO: 3259 - protein, 10 aa, Fusobacterium nucleatum
GKSAGIYSKK

SEQ ID NO: 3260 - protein, 8 aa, Fusobacterium nucleatum
STNGNRSW

SEQ ID NO: 3261 - protein, 10 aa, Fusobacterium nucleatum
GQDSTGLFLK

SEQ ID NO: 3262 - protein, 9 aa, Fusobacterium nucleatum
ENSSATNKK

SEQ ID NO: 3263 - protein, 10 aa, Fusobacterium nucleatum
GASLFYATSK

SEQ ID NO: 3264 - protein, 8 aa, Fusobacterium nucleatum
RPYGALKV

SEQ ID NO: 3265 - protein, 10 aa, Fusobacterium nucleatum
AYTNADWFNI

SEQ ID NO: 3266 - protein, 10 aa, Fusobacterium nucleatum
YSIIENGATK

SEQ ID NO: 3267 - protein, 9 aa, Fusobacterium nucleatum
FNKLNGIGK

SEQ ID NO: 3268 - protein, 10 aa, Fusobacterium nucleatum
ALVGDTEVDL

SEQ ID NO: 3269 - protein, 11 aa, Fusobacterium nucleatum
RATATDKIQSM

SEQ ID NO: 3270 - protein, 8 aa, Fusobacterium nucleatum
LKGLRLEL

SEQ ID NO: 3271 - protein, 11 aa, Fusobacterium nucleatum
HTSGTIDVGQK

SEQ ID NO: 3272 - protein, 9 aa, Fusobacterium nucleatum
SEKTNKKQW

SEQ ID NO: 3273 - protein, 9 aa, Fusobacterium nucleatum
AENTGTINL

SEQ ID NO: 3274 - protein, 9 aa, Fusobacterium nucleatum
NEQTLLTQA

SEQ ID NO: 3275 - protein, 11 aa, Fusobacterium nucleatum
YVENSSATNKK

SEQ ID NO: 3276 - protein, 9 aa, Fusobacterium nucleatum
IIVNKEASV

SEQ ID NO: 3277 - protein, 9 aa, Fusobacterium nucleatum
TNNSATLTL

SEQ ID NO: 3278 - protein, 10 aa, Fusobacterium nucleatum
STQANTQSEV

SEQ ID NO: 3279 - protein, 10 aa, Fusobacterium nucleatum
SYGVIIRGKR

SEQ ID NO: 3280 - protein, 8 aa, Fusobacterium nucleatum
SIRPYGAL

SEQ ID NO: 3281 - protein, 10 aa, Fusobacterium nucleatum
GTINFSTGKG

SEQ ID NO: 3282 - protein, 11 aa, Fusobacterium nucleatum
IKPEVGTELAY

SEQ ID NO: 3283 - protein, 10 aa, Fusobacterium nucleatum
LGQDSTGLFL

SEQ ID NO: 3284 - protein, 9 aa, Fusobacterium nucleatum
LGNGSVGLY

SEQ ID NO: 3285 - protein, 8 aa, Fusobacterium nucleatum
LTSIAGSL

SEQ ID NO: 3286 - protein, 9 aa, Fusobacterium nucleatum
SAKINLGTV

SEQ ID NO: 3287 - protein, 9 aa, Fusobacterium nucleatum
KHNDYLSIK

SEQ ID NO: 3288 - protein, 9 aa, Fusobacterium nucleatum
KSAGIIGKL

SEQ ID NO: 3289 - protein, 11 aa, Fusobacterium nucleatum
SLIGMFAQAEA

SEQ ID NO: 3290 - protein, 10 aa, Fusobacterium nucleatum
NTGNINVNSK

SEQ ID NO: 3291 - protein, 9 aa, Fusobacterium nucleatum
STAMFINSA

SEQ ID NO: 3292 - protein, 9 aa, Fusobacterium nucleatum
GMAGDNSTV

SEQ ID NO: 3293 - protein, 11 aa, Fusobacterium nucleatum
NSNHLIAFYIK

SEQ ID NO: 3294 - protein, 9 aa, Fusobacterium nucleatum
NASSITNNK

SEQ ID NO: 3295 - protein, 8 aa, Fusobacterium nucleatum
SEIINSGI

SEQ ID NO: 3296 - protein, 10 aa, Fusobacterium nucleatum
ISWKDVSQAY

SEQ ID NO: 3297 - protein, 10 aa, Fusobacterium nucleatum
TGTIDLNSGA

SEQ ID NO: 3298 - protein, 10 aa, Fusobacterium nucleatum
SLVTNNSATL

SEQ ID NO: 3299 - protein, 10 aa, Fusobacterium nucleatum
SEDFSIRPYG

SEQ ID NO: 3300 - protein, 9 aa, Fusobacterium nucleatum
NAGKIALEK

SEQ ID NO: 3301 - protein, 8 aa, Fusobacterium nucleatum
KTGSAGIY

SEQ ID NO: 3302 - protein, 11 aa, Fusobacterium nucleatum
RFKFKDIGNSK

SEQ ID NO: 3303 - protein, 10 aa, Fusobacterium nucleatum
WTGIPTTVNV

SEQ ID NO: 3304 - protein, 9 aa, Fusobacterium nucleatum
QRLGVTGNV

SEQ ID NO: 3305 - protein, 9 aa, Fusobacterium nucleatum
GEGASLFYA

SEQ ID NO: 3306 - protein, 9 aa, Fusobacterium nucleatum
APTAPNAPS

SEQ ID NO: 3307 - protein, 8 aa, Fusobacterium nucleatum
GLVDLENL

SEQ ID NO: 3308 - protein, 10 aa, Fusobacterium nucleatum
KTNIYTNTDA

SEQ ID NO: 3309 - protein, 10 aa, Fusobacterium nucleatum
KTLDVELGKN

SEQ ID NO: 3310 - protein, 9 aa, Fusobacterium nucleatum
NAYGVAYVH

SEQ ID NO: 3311 - protein, 9 aa, Fusobacterium nucleatum
AFYGKNSDI

SEQ ID NO: 3312 - protein, 10 aa, Fusobacterium nucleatum
KGNNKIAENK

SEQ ID NO: 3313 - protein, 9 aa, Fusobacterium nucleatum
SRATATDKI

SEQ ID NO: 3314 - protein, 10 aa, Fusobacterium nucleatum
DAQGTAGTPY

SEQ ID NO: 3315 - protein, 10 aa, Fusobacterium nucleatum
KLGQDSTGLF

SEQ ID NO: 3316 - protein, 9 aa, Fusobacterium nucleatum
SNIQGVGVY

SEQ ID NO: 3317 - protein, 9 aa, Fusobacterium nucleatum
GMSDIGFYV

SEQ ID NO: 3318 - protein, 9 aa, Fusobacterium nucleatum
GIYSDGDTK

SEQ ID NO: 3319 - protein, 11 aa, Fusobacterium nucleatum
AQNNGKVGNNK

SEQ ID NO: 3320 - protein, 10 aa, Fusobacterium nucleatum
NHGIIDFSAA

SEQ ID NO: 3321 - protein, 10 aa, Fusobacterium nucleatum
LYSKGQSYTV

SEQ ID NO: 3322 - protein, 11 aa, Fusobacterium nucleatum
RIFNKLNSIGK

SEQ ID NO: 3323 - protein, 10 aa, Fusobacterium nucleatum
YNFTDGLEQR

SEQ ID NO: 3324 - protein, 9 aa, Fusobacterium nucleatum
GMYLTNAEK

SEQ ID NO: 3325 - protein, 9 aa, Fusobacterium nucleatum
GIYAQGNYK

SEQ ID NO: 3326 - protein, 10 aa, Fusobacterium nucleatum
GTLISTRIDK

SEQ ID NO: 3327 - protein, 8 aa, Fusobacterium nucleatum
KSAGIYSK

SEQ ID NO: 3328 - protein, 9 aa, Fusobacterium nucleatum
KQWFVKGDV

SEQ ID NO: 3329 - protein, 10 aa, Fusobacterium nucleatum
MAADNGGHIV

SEQ ID NO: 3330 - protein, 10 aa, Fusobacterium nucleatum
RVLMKADNQK

SEQ ID NO: 3331 - protein, 10 aa, Fusobacterium nucleatum
LFLMLGVGAF

SEQ ID NO: 3332 - protein, 9 aa, Fusobacterium nucleatum
EQTLLTQAY

SEQ ID NO: 3333 - protein, 10 aa, Fusobacterium nucleatum
FLMLGVGAFS

SEQ ID NO: 3334 - protein, 11 aa, Fusobacterium nucleatum
TLEAPDVNPQV

SEQ ID NO: 3335 - protein, 10 aa, Fusobacterium nucleatum
QDEESAGMYV

SEQ ID NO: 3336 - protein, 10 aa, Fusobacterium nucleatum
LEAPAVNPQV

SEQ ID NO: 3337 - protein, 10 aa, Fusobacterium nucleatum
TSIAGSLTWI

SEQ ID NO: 3338 - protein, 9 aa, Fusobacterium nucleatum
TSAGMLGDK

SEQ ID NO: 3339 - protein, 10 aa, Fusobacterium nucleatum
TPITAGKSGV

SEQ ID NO: 3340 - protein, 9 aa, Fusobacterium nucleatum
AGKKTLGVF

SEQ ID NO: 3341 - protein, 10 aa, Fusobacterium nucleatum
GKVNQNRVAY

SEQ ID NO: 3342 - protein, 11 aa, Fusobacterium nucleatum
TNKIQSMTGVY

SEQ ID NO: 3343 - protein, 10 aa, Fusobacterium nucleatum
EKTNKKQWFV

SEQ ID NO: 3344 - protein, 10 aa, Fusobacterium nucleatum
HTSGTIEVGE

SEQ ID NO: 3345 - protein, 10 aa, Fusobacterium nucleatum
WSSWQFGMNY

SEQ ID NO: 3346 - protein, 9 aa, Fusobacterium nucleatum
YIDELQKQI

SEQ ID NO: 3347 - protein, 10 aa, Fusobacterium nucleatum
NHGTIDFSAA

SEQ ID NO: 3348 - protein, 9 aa, Fusobacterium nucleatum
TASTAKLSL

SEQ ID NO: 3349 - protein, 10 aa, Fusobacterium nucleatum
REPTNEVEIL

SEQ ID NO: 3350 - protein, 9 aa, Fusobacterium nucleatum
KLGKGTGWY

SEQ ID NO: 3351 - protein, 9 aa, Fusobacterium nucleatum
DAESITGTK

SEQ ID NO: 3352 - protein, 11 aa, Fusobacterium nucleatum
ATNEKNIGILA

SEQ ID NO: 3353 - protein, 10 aa, Fusobacterium nucleatum
VRSEEGRVYI

SEQ ID NO: 3354 - protein, 10 aa, Fusobacterium nucleatum
ANSLEPTIGI

SEQ ID NO: 3355 - protein, 11 aa, Fusobacterium nucleatum
EGVTITVKNGK

SEQ ID NO: 3356 - protein, 9 aa, Fusobacterium nucleatum
DIDGATPPI

SEQ ID NO: 3357 - protein, 11 aa, Fusobacterium nucleatum
IFNAKSKYYTY

SEQ ID NO: 3358 - protein, 9 aa, Fusobacterium nucleatum
KHTSGTIDV

SEQ ID NO: 3359 - protein, 9 aa, Fusobacterium nucleatum
HLRNSWSNP

SEQ ID NO: 3360 - protein, 9 aa, Fusobacterium nucleatum
KGSANFSNK

SEQ ID NO: 3361 - protein, 10 aa, Fusobacterium nucleatum
RLGVTGNVGY

SEQ ID NO: 3362 - protein, 9 aa, Fusobacterium nucleatum
GKNSTFGLL

SEQ ID NO: 3363 - protein, 9 aa, Fusobacterium nucleatum
LRSIAKRYK

SEQ ID NO: 3364 - protein, 10 aa, Fusobacterium nucleatum
TLRTSLEVAY

SEQ ID NO: 3365 - protein, 11 aa, Fusobacterium nucleatum
ATNSNLINNSK

SEQ ID NO: 3366 - protein, 10 aa, Fusobacterium nucleatum
VMNGSTLENH

SEQ ID NO: 3367 - protein, 9 aa, Fusobacterium nucleatum
SLTWIATPV

SEQ ID NO: 3368 - protein, 11 aa, Fusobacterium nucleatum
GTSGDKATLDK

SEQ ID NO: 3369 - protein, 9 aa, Fusobacterium nucleatum
ASLFYATLK

SEQ ID NO: 3370 - protein, 10 aa, Fusobacterium nucleatum
KESNLGMSDI

SEQ ID NO: 3371 - protein, 9 aa, Fusobacterium nucleatum
VTALTNRDY

SEQ ID NO: 3372 - protein, 9 aa, Fusobacterium nucleatum
LGNDSVFLY

SEQ ID NO: 3373 - protein, 10 aa, Fusobacterium nucleatum
KPKMVLTHVI

SEQ ID NO: 3374 - protein, 11 aa, Fusobacterium nucleatum
GELTIAGKKTL

SEQ ID NO: 3375 - protein, 9 aa, Fusobacterium nucleatum
KAILDEDYK

SEQ ID NO: 3376 - protein, 10 aa, Fusobacterium nucleatum
GIYSIIENGA

SEQ ID NO: 3377 - protein, 9 aa, Fusobacterium nucleatum
DTASAKINL

SEQ ID NO: 3378 - protein, 9 aa, Fusobacterium nucleatum
GIKTLRTSL

SEQ ID NO: 3379 - protein, 9 aa, Fusobacterium nucleatum
FTNNGTIDF

SEQ ID NO: 3380 - protein, 9 aa, Fusobacterium nucleatum
NEGKIEIKA

SEQ ID NO: 3381 - protein, 10 aa, Fusobacterium nucleatum
SAVYVSKGGK

SEQ ID NO: 3382 - protein, 10 aa, Fusobacterium nucleatum
VNKEASVGIY

SEQ ID NO: 3383 - protein, 11 aa, Fusobacterium nucleatum
ISSSTNGNRSW

SEQ ID NO: 3384 - protein, 9 aa, Fusobacterium nucleatum
GILATNSNL

SEQ ID NO: 3385 - protein, 9 aa, Fusobacterium nucleatum
YGVIIRGKR

SEQ ID NO: 3386 - protein, 10 aa, Fusobacterium nucleatum
HTSGTIDVGQ

SEQ ID NO: 3387 - protein, 10 aa, Fusobacterium nucleatum
LAENTGTINL

SEQ ID NO: 3388 - protein, 10 aa, Fusobacterium nucleatum
EAVGVFAGVP

SEQ ID NO: 3389 - protein, 10 aa, Fusobacterium nucleatum
GLSDIGFYVD

SEQ ID NO: 3390 - protein, 9 aa, Fusobacterium nucleatum
ILAENGVGI

SEQ ID NO: 3391 - protein, 10 aa, Fusobacterium nucleatum
VLVANDGANV

SEQ ID NO: 3392 - protein, 10 aa, Fusobacterium nucleatum
GTTAGTGIFI

SEQ ID NO: 3393 - protein, 10 aa, Fusobacterium nucleatum
SLFYATLKAK

SEQ ID NO: 3394 - protein, 9 aa, Fusobacterium nucleatum
KISIGAKSY

SEQ ID NO: 3395 - protein, 10 aa, Fusobacterium nucleatum
TSGDKATLDK

SEQ ID NO: 3396 - protein, 10 aa, Fusobacterium nucleatum
AENIGTINLT

SEQ ID NO: 3397 - protein, 10 aa, Fusobacterium nucleatum
TEPTVQTLEA

SEQ ID NO: 3398 - protein, 10 aa, Fusobacterium nucleatum
TVNVTALTNR

SEQ ID NO: 3399 - protein, 11 aa, Fusobacterium nucleatum
AYRHYFGIKTL

SEQ ID NO: 3400 - protein, 11 aa, Fusobacterium nucleatum
HTSGTIEVGEK

SEQ ID NO: 3401 - protein, 9 aa, Fusobacterium nucleatum
WQFGMNYFY

SEQ ID NO: 3402 - protein, 9 aa, Fusobacterium nucleatum
VSLGNDSVF

SEQ ID NO: 3403 - protein, 11 aa, Fusobacterium nucleatum
AKETSISSVSK

SEQ ID NO: 3404 - protein, 10 aa, Fusobacterium nucleatum
STGMYLINAE

SEQ ID NO: 3405 - protein, 9 aa, Fusobacterium nucleatum
TGIVHNRFK

SEQ ID NO: 3406 - protein, 9 aa, Fusobacterium nucleatum
GVYVDDGAK

SEQ ID NO: 3407 - protein, 11 aa, Fusobacterium nucleatum
GMMITNDTTGI

SEQ ID NO: 3408 - protein, 9 aa, Fusobacterium nucleatum
GDQVVKSPW

SEQ ID NO: 3409 - protein, 9 aa, Fusobacterium nucleatum
LLLKGETDI

SEQ ID NO: 3410 - protein, 9 aa, Fusobacterium nucleatum
GVFAGVPTM

SEQ ID NO: 3411 - protein, 9 aa, Fusobacterium nucleatum
IWQEGNFEA

SEQ ID NO: 3412 - protein, 9 aa, Fusobacterium nucleatum
SIRPYGALK

SEQ ID NO: 3413 - protein, 8 aa, Fusobacterium nucleatum
ASAGIYAK

SEQ ID NO: 3414 - protein, 9 aa, Fusobacterium nucleatum
ATNTSGGVI

SEQ ID NO: 3415 - protein, 8 aa, Fusobacterium nucleatum
MTWQEGNF

SEQ ID NO: 3416 - protein, 9 aa, Fusobacterium nucleatum
VQGVGVYGK

SEQ ID NO: 3417 - protein, 11 aa, Fusobacterium nucleatum
KADGSTSHESL

SEQ ID NO: 3418 - protein, 8 aa, Fusobacterium nucleatum
YYTYGIGI

SEQ ID NO: 3419 - protein, 11 aa, Fusobacterium nucleatum
MGHQYANVQQR

SEQ ID NO: 3420 - protein, 9 aa, Fusobacterium nucleatum
RSEEGKVHI

SEQ ID NO: 3421 - protein, 9 aa, Fusobacterium nucleatum
GTKGVVAIA

SEQ ID NO: 3422 - protein, 9 aa, Fusobacterium nucleatum
RVQATGNIL

SEQ ID NO: 3423 - protein, 10 aa, Fusobacterium nucleatum
RSIAKRYKSV

SEQ ID NO: 3424 - protein, 11 aa, Fusobacterium nucleatum
IVGMAGDSSTV

SEQ ID NO: 3425 - protein, 11 aa, Fusobacterium nucleatum
KNSIGIYGFYN

SEQ ID NO: 3426 - protein, 8 aa, Fusobacterium nucleatum
YIEGNSTL

SEQ ID NO: 3427 - protein, 9 aa, Fusobacterium nucleatum
NSNFTNNSK

SEQ ID NO: 3428 - protein, 11 aa, Fusobacterium nucleatum
LKIGEKAVGLY

SEQ ID NO: 3429 - protein, 11 aa, Fusobacterium nucleatum
GSNVRGGVGLR

SEQ ID NO: 3430 - protein, 9 aa, Fusobacterium nucleatum
PRMVLTHVI

SEQ ID NO: 3431 - protein, 10 aa, Fusobacterium nucleatum
LTINAPSAPT

SEQ ID NO: 3432 - protein, 10 aa, Fusobacterium nucleatum
VTGNVGYDTK

SEQ ID NO: 3433 - protein, 10 aa, Fusobacterium nucleatum
GKNSIGIYGF

SEQ ID NO: 3434 - protein, 9 aa, Fusobacterium nucleatum
AGMLGSEGK

SEQ ID NO: 3435 - protein, 10 aa, Fusobacterium nucleatum
NFTNNSKISL

SEQ ID NO: 3436 - protein, 9 aa, Fusobacterium nucleatum
SAKKSAGII

SEQ ID NO: 3437 - protein, 8 aa, Fusobacterium nucleatum
AESGVGIF

SEQ ID NO: 3438 - protein, 10 aa, Fusobacterium nucleatum
GKTLDVELGK

SEQ ID NO: 3439 - protein, 11 aa, Fusobacterium nucleatum
VGSNIQGVGVY

SEQ ID NO: 3440 - protein, 9 aa, Fusobacterium nucleatum
TGIPTTVNV

SEQ ID NO: 3441 - protein, 8 aa, Fusobacterium nucleatum
ASIFYATL

SEQ ID NO: 3442 - protein, 9 aa, Fusobacterium nucleatum
MAADNGGYI

SEQ ID NO: 3443 - protein, 10 aa, Fusobacterium nucleatum
ILNMTTATNI

SEQ ID NO: 3444 - protein, 11 aa, Fusobacterium nucleatum
FYATSKAKAIL

SEQ ID NO: 3445 - protein, 9 aa, Fusobacterium nucleatum
SWQFGMNYF

SEQ ID NO: 3446 - protein, 11 aa, Fusobacterium nucleatum
GRVLMKADNQK

SEQ ID NO: 3447 - protein, 11 aa, Fusobacterium nucleatum
WYTGIVHNRFK

SEQ ID NO: 3448 - protein, 11 aa, Fusobacterium nucleatum
STNPDPNKLEL

SEQ ID NO: 3449 - protein, 10 aa, Fusobacterium nucleatum
RGKGTWGISW

SEQ ID NO: 3450 - protein, 9 aa, Fusobacterium nucleatum
VAMAKLPYT

SEQ ID NO: 3451 - protein, 10 aa, Fusobacterium nucleatum
LLSKYLNNNT

SEQ ID NO: 3452 - protein, 9 aa, Fusobacterium nucleatum
YVSNGGKVA

SEQ ID NO: 3453 - protein, 9 aa, Fusobacterium nucleatum
ATGKTVTSV

SEQ ID NO: 3454 - protein, 9 aa, Fusobacterium nucleatum
VTANNNRAL

SEQ ID NO: 3455 - protein, 10 aa, Fusobacterium nucleatum
VGIYSKGNNK

SEQ ID NO: 3456 - protein, 11 aa, Fusobacterium nucleatum
IVNKEASVGIY

SEQ ID NO: 3457 - protein, 10 aa, Fusobacterium nucleatum
VKFGTGSKLK

SEQ ID NO: 3458 - protein, 10 aa, Fusobacterium nucleatum
GMYSSSSLKA

SEQ ID NO: 3459 - protein, 11 aa, Fusobacterium nucleatum
ETNTNAGLIAI

SEQ ID NO: 3460 - protein, 9 aa, Fusobacterium nucleatum
GDASTGMYL

SEQ ID NO: 3461 - protein, 10 aa, Fusobacterium nucleatum
TLNAPSSAGI

SEQ ID NO: 3462 - protein, 9 aa, Fusobacterium nucleatum
SEGFSIRPY

SEQ ID NO: 3463 - protein, 10 aa, Fusobacterium nucleatum
STRIDKGIGI

SEQ ID NO: 3464 - protein, 10 aa, Fusobacterium nucleatum
ILAEIDEANG

SEQ ID NO: 3465 - protein, 11 aa, Fusobacterium nucleatum
MLGVSAFSEEV

SEQ ID NO: 3466 - protein, 9 aa, Fusobacterium nucleatum
KSAVTASTA

SEQ ID NO: 3467 - protein, 10 aa, Fusobacterium nucleatum
AYDEMMGHQY

SEQ ID NO: 3468 - protein, 9 aa, Fusobacterium nucleatum
KTLDVELGK

SEQ ID NO: 3469 - protein, 11 aa, Fusobacterium nucleatum
ITLNAPSSAGI

SEQ ID NO: 3470 - protein, 10 aa, Fusobacterium nucleatum
GKEFRLSEDF

SEQ ID NO: 3471 - protein, 9 aa, Fusobacterium nucleatum
TELAYRHYF

SEQ ID NO: 3472 - protein, 9 aa, Fusobacterium nucleatum
ADNSYGVII

SEQ ID NO: 3473 - protein, 9 aa, Fusobacterium nucleatum
ESIGIYSNA

SEQ ID NO: 3474 - protein, 9 aa, Fusobacterium nucleatum
NVERYAVIK

SEQ ID NO: 3475 - protein, 11 aa, Fusobacterium nucleatum
ASGEIKVDAAY

SEQ ID NO: 3476 - protein, 9 aa, Fusobacterium nucleatum
HNKMHRKFL

SEQ ID NO: 3477 - protein, 10 aa, Fusobacterium nucleatum
KVTAESGVGI

SEQ ID NO: 3478 - protein, 10 aa, Fusobacterium nucleatum
STIKESLIGM

SEQ ID NO: 3479 - protein, 9 aa, Fusobacterium nucleatum
EPTIGIYTA

SEQ ID NO: 3480 - protein, 10 aa, Fusobacterium nucleatum
KNTSKLDYTL

SEQ ID NO: 3481 - protein, 10 aa, Fusobacterium nucleatum
AFYIKNGGNF

SEQ ID NO: 3482 - protein, 8 aa, Fusobacterium nucleatum
SIAGSLTW

SEQ ID NO: 3483 - protein, 9 aa, Fusobacterium nucleatum
RYAVIKNYG

SEQ ID NO: 3484 - protein, 9 aa, Fusobacterium nucleatum
VVDEIFNAK

SEQ ID NO: 3485 - protein, 10 aa, Fusobacterium nucleatum
FILNNTDPNK

SEQ ID NO: 3486 - protein, 9 aa, Fusobacterium nucleatum
NGKKSAGVY

SEQ ID NO: 3487 - protein, 10 aa, Fusobacterium nucleatum
KKTITLSAKK

SEQ ID NO: 3488 - protein, 11 aa, Fusobacterium nucleatum
GIYAPKANISK

SEQ ID NO: 3489 - protein, 11 aa, Fusobacterium nucleatum
TIAGKKTLGVF

SEQ ID NO: 3490 - protein, 10 aa, Fusobacterium nucleatum
NLDGNGNIGI

SEQ ID NO: 3491 - protein, 10 aa, Fusobacterium nucleatum
ISIGAKSYGF

SEQ ID NO: 3492 - protein, 9 aa, Fusobacterium nucleatum
GSTVNIDHW

SEQ ID NO: 3493 - protein, 9 aa, Fusobacterium nucleatum
TAQGTGNGI

SEQ ID NO: 3494 - protein, 9 aa, Fusobacterium nucleatum
AVYVSKGGK

SEQ ID NO: 3495 - protein, 10 aa, Fusobacterium nucleatum
NTDPNKTNIY

SEQ ID NO: 3496 - protein, 11 aa, Fusobacterium nucleatum
FTSVAKNNGTL

SEQ ID NO: 3497 - protein, 9 aa, Fusobacterium nucleatum
ATINGELDI

SEQ ID NO: 3498 - protein, 9 aa, Fusobacterium nucleatum
NTVTNTGDI

SEQ ID NO: 3499 - protein, 10 aa, Fusobacterium nucleatum
KIKEKSGEVR

SEQ ID NO: 3500 - protein, 9 aa, Fusobacterium nucleatum
DASTGMYLI

SEQ ID NO: 3501 - protein, 9 aa, Fusobacterium nucleatum
STNPDPNKL

SEQ ID NO: 3502 - protein, 10 aa, Fusobacterium nucleatum
TGMYLTNAEK

SEQ ID NO: 3503 - protein, 8 aa, Fusobacterium nucleatum
GEKGIGML

SEQ ID NO: 3504 - protein, 8 aa, Fusobacterium nucleatum
LQAKVGLF

SEQ ID NO: 3505 - protein, 10 aa, Fusobacterium nucleatum
ITSFGEGASI

SEQ ID NO: 3506 - protein, 10 aa, Fusobacterium nucleatum
LAYLENSKFI

SEQ ID NO: 3507 - protein, 10 aa, Fusobacterium nucleatum
SSSTNGNRSW

SEQ ID NO: 3508 - protein, 11 aa, Fusobacterium nucleatum
GIGLLQEIQEV

SEQ ID NO: 3509 - protein, 8 aa, Fusobacterium nucleatum
GQITGVAM

SEQ ID NO: 3510 - protein, 10 aa, Fusobacterium nucleatum
VKNEGSAGVL

SEQ ID NO: 3511 - protein, 9 aa, Fusobacterium nucleatum
KYSLGLAIL

SEQ ID NO: 3512 - protein, 8 aa, Fusobacterium nucleatum
KVYTDVSK

SEQ ID NO: 3513 - protein, 9 aa, Fusobacterium nucleatum
NNGTLISTR

SEQ ID NO: 3514 - protein, 9 aa, Fusobacterium nucleatum
INYTGNMEI

SEQ ID NO: 3515 - protein, 9 aa, Fusobacterium nucleatum
SPDPNKLEI

SEQ ID NO: 3516 - protein, 9 aa, Fusobacterium nucleatum
NTNLTTDSK

SEQ ID NO: 3517 - protein, 10 aa, Fusobacterium nucleatum
TYGIGVKNEI

SEQ ID NO: 3518 - protein, 9 aa, Fusobacterium nucleatum
SNKIKTFGM

SEQ ID NO: 3519 - protein, 10 aa, Fusobacterium nucleatum
TSFGEGASIF

SEQ ID NO: 3520 - protein, 9 aa, Fusobacterium nucleatum
SLIGMFAQA

SEQ ID NO: 3521 - protein, 9 aa, Fusobacterium nucleatum
KIKEKSGEM

SEQ ID NO: 3522 - protein, 11 aa, Fusobacterium nucleatum
GVYAPKANISK

SEQ ID NO: 3523 - protein, 11 aa, Fusobacterium nucleatum
YIEGNSTLTGV

SEQ ID NO: 3524 - protein, 10 aa, Fusobacterium nucleatum
TLTLTNQNSI

SEQ ID NO: 3525 - protein, 11 aa, Fusobacterium nucleatum
IGMFAQAESGK

SEQ ID NO: 3526 - protein, 10 aa, Fusobacterium nucleatum
LGVSAFSEEV

SEQ ID NO: 3527 - protein, 10 aa, Fusobacterium nucleatum
GIYSKTPSSV

SEQ ID NO: 3528 - protein, 10 aa, Fusobacterium nucleatum
KEASVGIYAK

SEQ ID NO: 3529 - protein, 10 aa, Fusobacterium nucleatum
KIDRDNSISS

SEQ ID NO: 3530 - protein, 11 aa, Fusobacterium nucleatum
KNEEALLTQAY

SEQ ID NO: 3531 - protein, 11 aa, Fusobacterium nucleatum
VATDGVVGISL

SEQ ID NO: 3532 - protein, 10 aa, Fusobacterium nucleatum
NTDVNKTNIY

SEQ ID NO: 3533 - protein, 9 aa, Fusobacterium nucleatum
LYKVEKDLR

SEQ ID NO: 3534 - protein, 8 aa, Fusobacterium nucleatum
RVYINANK

SEQ ID NO: 3535 - protein, 9 aa, Fusobacterium nucleatum
DSYAGRDGK

SEQ ID NO: 3536 - protein, 9 aa, Fusobacterium nucleatum
GKATINGEL

SEQ ID NO: 3537 - protein, 10 aa, Fusobacterium nucleatum
VYAPKANISK

SEQ ID NO: 3538 - protein, 11 aa, Fusobacterium nucleatum
AENTNLTTDSK

SEQ ID NO: 3539 - protein, 9 aa, Fusobacterium nucleatum
GVGAFSEEV

SEQ ID NO: 3540 - protein, 8 aa, Fusobacterium nucleatum
KRSLGMLA

SEQ ID NO: 3541 - protein, 9 aa, Fusobacterium nucleatum
GMYGKGVGT

SEQ ID NO: 3542 - protein, 8 aa, Fusobacterium nucleatum
IFHAKSKY

SEQ ID NO: 3543 - protein, 9 aa, Fusobacterium nucleatum
YSLGLAILF

SEQ ID NO: 3544 - protein, 11 aa, Fusobacterium nucleatum
KRIFNKLNGIG

SEQ ID NO: 3545 - protein, 11 aa, Fusobacterium nucleatum
SWQFGMNYFYD

SEQ ID NO: 3546 - protein, 9 aa, Fusobacterium nucleatum
NIALGNGSV

SEQ ID NO: 3547 - protein, 10 aa, Fusobacterium nucleatum
GTVNQNRVAY

SEQ ID NO: 3548 - protein, 11 aa, Fusobacterium nucleatum
MFVGYNKMHRK

SEQ ID NO: 3549 - protein, 10 aa, Fusobacterium nucleatum
TVENTGKIYL

SEQ ID NO: 3550 - protein, 10 aa, Fusobacterium nucleatum
HGTIDFSAAE

SEQ ID NO: 3551 - protein, 9 aa, Fusobacterium nucleatum
SPWSSWQFG

SEQ ID NO: 3552 - protein, 8 aa, Fusobacterium nucleatum
YAVNGTEI

SEQ ID NO: 3553 - protein, 9 aa, Fusobacterium nucleatum
KTLRTSVGV

SEQ ID NO: 3554 - protein, 11 aa, Fusobacterium nucleatum
IGRSALSDSKY

SEQ ID NO: 3555 - protein, 8 aa, Fusobacterium nucleatum
AVGVFAGV

SEQ ID NO: 3556 - protein, 10 aa, Fusobacterium nucleatum
FISHLGNLGA

SEQ ID NO: 3557 - protein, 9 aa, Fusobacterium nucleatum
ISLNAPSSA

SEQ ID NO: 3558 - protein, 11 aa, Fusobacterium nucleatum
GIYSKKEGGAK

SEQ ID NO: 3559 - protein, 9 aa, Fusobacterium nucleatum
VYINANKNL

SEQ ID NO: 3560 - protein, 9 aa, Fusobacterium nucleatum
FLVVDEIFH

SEQ ID NO: 3561 - protein, 10 aa, Fusobacterium nucleatum
NLGKVNQNRV

SEQ ID NO: 3562 - protein, 9 aa, Fusobacterium nucleatum
KSVGIYSKI

SEQ ID NO: 3563 - protein, 10 aa, Fusobacterium nucleatum
LDQIQGRNFK

SEQ ID NO: 3564 - protein, 10 aa, Fusobacterium nucleatum
SVTNTGNITV

SEQ ID NO: 3565 - protein, 10 aa, Fusobacterium nucleatum
NTMLYLKNSI

SEQ ID NO: 3566 - protein, 10 aa, Fusobacterium nucleatum
KNEEALLTQA

SEQ ID NO: 3567 - protein, 10 aa, Fusobacterium nucleatum
GMLSKDTSSI

SEQ ID NO: 3568 - protein, 10 aa, Fusobacterium nucleatum
LGLSDIGFYV

SEQ ID NO: 3569 - protein, 9 aa, Fusobacterium nucleatum
GDMFVGYNK

SEQ ID NO: 3570 - protein, 9 aa, Fusobacterium nucleatum
NSKSSVGML

SEQ ID NO: 3571 - protein, 8 aa, Fusobacterium nucleatum
AESGIGML

SEQ ID NO: 3572 - protein, 9 aa, Fusobacterium nucleatum
NSIAQLDGA

SEQ ID NO: 3573 - protein, 8 aa, Fusobacterium nucleatum
TDKGIGIY

SEQ ID NO: 3574 - protein, 9 aa, Fusobacterium nucleatum
MLGQNASSI

SEQ ID NO: 3575 - protein, 8 aa, Fusobacterium nucleatum
YQGVTITV

SEQ ID NO: 3576 - protein, 9 aa, Fusobacterium nucleatum
KGRGDKPQK

SEQ ID NO: 3577 - protein, 10 aa, Fusobacterium nucleatum
VLAYLENSKF

SEQ ID NO: 3578 - protein, 9 aa, Fusobacterium nucleatum
DVDVSHWNF

SEQ ID NO: 3579 - protein, 11 aa, Fusobacterium nucleatum
TTVNVTALTNR

SEQ ID NO: 3580 - protein, 9 aa, Fusobacterium nucleatum
SYGVIIRGK

SEQ ID NO: 3581 - protein, 8 aa, Fusobacterium nucleatum
MHRKFLVV

SEQ ID NO: 3582 - protein, 11 aa, Fusobacterium nucleatum
AEIDEANGGTV

SEQ ID NO: 3583 - protein, 9 aa, Fusobacterium nucleatum
YAPKSNISK

SEQ ID NO: 3584 - protein, 11 aa, Fusobacterium nucleatum
KQLQAKVGLFK

SEQ ID NO: 3585 - protein, 9 aa, Fusobacterium nucleatum
IYNTGNINI

SEQ ID NO: 3586 - protein, 9 aa, Fusobacterium nucleatum
AENSIGIMG

SEQ ID NO: 3587 - protein, 9 aa, Fusobacterium nucleatum
TVKNGKPTF

SEQ ID NO: 3588 - protein, 9 aa, Fusobacterium nucleatum
EVGEKSIGI

SEQ ID NO: 3589 - protein, 10 aa, Fusobacterium nucleatum
ALKGLRLELI

SEQ ID NO: 3590 - protein, 10 aa, Fusobacterium nucleatum
NLGLSDIGFY

SEQ ID NO: 3591 - protein, 9 aa, Fusobacterium nucleatum
MTGKVYSDV

SEQ ID NO: 3592 - protein, 11 aa, Fusobacterium nucleatum
LGQDSTGLFLK

SEQ ID NO: 3593 - protein, 11 aa, Fusobacterium nucleatum
EKSTAMFINSA

SEQ ID NO: 3594 - protein, 8 aa, Fusobacterium nucleatum
ESVGIFAK

SEQ ID NO: 3595 - protein, 9 aa, Fusobacterium nucleatum
GLSDIGFYV

SEQ ID NO: 3596 - protein, 9 aa, Fusobacterium nucleatum
VTNKNIITL

SEQ ID NO: 3597 - protein, 9 aa, Fusobacterium nucleatum
SGRISLSNS

SEQ ID NO: 3598 - protein, 11 aa, Fusobacterium nucleatum
VLAENTGTINL

SEQ ID NO: 3599 - protein, 10 aa, Fusobacterium nucleatum
KVDAAYSTGM

SEQ ID NO: 3600 - protein, 10 aa, Fusobacterium nucleatum
LTSIAGSLTW

SEQ ID NO: 3601 - protein, 8 aa, Fusobacterium nucleatum
VENTGKIY

SEQ ID NO: 3602 - protein, 9 aa, Fusobacterium nucleatum
LEQRYDMNA

SEQ ID NO: 3603 - protein, 9 aa, Fusobacterium nucleatum
RKYEGAPAS

SEQ ID NO: 3604 - protein, 8 aa, Fusobacterium nucleatum
ASHLIAFY

SEQ ID NO: 3605 - protein, 8 aa, Fusobacterium nucleatum
RLSEGFSI

SEQ ID NO: 3606 - protein, 9 aa, Fusobacterium nucleatum
SNIENNTTF

SEQ ID NO: 3607 - protein, 9 aa, Fusobacterium nucleatum
GMNYFYDHW

SEQ ID NO: 3608 - protein, 9 aa, Fusobacterium nucleatum
MEIGDGTTA

SEQ ID NO: 3609 - protein, 8 aa, Fusobacterium nucleatum
SKINSSSI

SEQ ID NO: 3610 - protein, 10 aa, Fusobacterium nucleatum
NNTNTGTVTM

SEQ ID NO: 3611 - protein, 10 aa, Fusobacterium nucleatum
THVINGETSI

SEQ ID NO: 3612 - protein, 11 aa, Fusobacterium nucleatum
GIKNEIGKEFR

SEQ ID NO: 3613 - protein, 8 aa, Fusobacterium nucleatum
TEFNGGTA

SEQ ID NO: 3614 - protein, 10 aa, Fusobacterium nucleatum
TLSAKKSTGI

SEQ ID NO: 3615 - protein, 11 aa, Fusobacterium nucleatum
INSQLIIGTEY

SEQ ID NO: 3616 - protein, 10 aa, Fusobacterium nucleatum
KVEEAVGVFA

SEQ ID NO: 3617 - protein, 9 aa, Fusobacterium nucleatum
TIKVGKNSI

SEQ ID NO: 3618 - protein, 11 aa, Fusobacterium nucleatum
KNEQTLLTQAY

SEQ ID NO: 3619 - protein, 9 aa, Fusobacterium nucleatum
RPYGALKVE

SEQ ID NO: 3620 - protein, 9 aa, Fusobacterium nucleatum
GRVSKIKEK

SEQ ID NO: 3621 - protein, 8 aa, Fusobacterium nucleatum
EEAVGVFA

SEQ ID NO: 3622 - protein, 11 aa, Fusobacterium nucleatum
GSNTIKLKGTK

SEQ ID NO: 3623 - protein, 10 aa, Fusobacterium nucleatum
TKEEMSAGMY

SEQ ID NO: 3624 - protein, 8 aa, Fusobacterium nucleatum
NSIGFYGK

SEQ ID NO: 3625 - protein, 9 aa, Fusobacterium nucleatum
LRAATGTNK

SEQ ID NO: 3626 - protein, 10 aa, Fusobacterium nucleatum
SVGMYSSSSL

SEQ ID NO: 3627 - protein, 10 aa, Fusobacterium nucleatum
GRGTGWYTGI

SEQ ID NO: 3628 - protein, 9 aa, Fusobacterium nucleatum
TKNSAGIMV

SEQ ID NO: 3629 - protein, 11 aa, Fusobacterium nucleatum
IYSIIENGATK

SEQ ID NO: 3630 - protein, 9 aa, Fusobacterium nucleatum
VPTMPVRPG

SEQ ID NO: 3631 - protein, 9 aa, Fusobacterium nucleatum
FTDGLEQRY

SEQ ID NO: 3632 - protein, 10 aa, Fusobacterium nucleatum
VRLEVKHNDY

SEQ ID NO: 3633 - protein, 9 aa, Fusobacterium nucleatum
MTTATNIAL

SEQ ID NO: 3634 - protein, 9 aa, Fusobacterium nucleatum
RTTDSYAGR

SEQ ID NO: 3635 - protein, 9 aa, Fusobacterium nucleatum
SEETSAGML

SEQ ID NO: 3636 - protein, 10 aa, Fusobacterium nucleatum
NKIQSMTGVY

SEQ ID NO: 3637 - protein, 10 aa, Fusobacterium nucleatum
KNTKDINVNT

SEQ ID NO: 3638 - protein, 11 aa, Fusobacterium nucleatum
GMSDIGFYVDT

SEQ ID NO: 3639 - protein, 9 aa, Fusobacterium nucleatum
TGSPSVAMY

SEQ ID NO: 3640 - protein, 9 aa, Fusobacterium nucleatum
TVGFTSVAK

SEQ ID NO: 3641 - protein, 10 aa, Fusobacterium nucleatum
EGSAAMLGEV

SEQ ID NO: 3642 - protein, 9 aa, Fusobacterium nucleatum
NTVPRSNPS

SEQ ID NO: 3643 - protein, 10 aa, Fusobacterium nucleatum
ISKVGTITLK

SEQ ID NO: 3644 - protein, 10 aa, Fusobacterium nucleatum
ENSIGIMGEK

SEQ ID NO: 3645 - protein, 8 aa, Fusobacterium nucleatum
SFGEGASL

SEQ ID NO: 3646 - protein, 11 aa, Fusobacterium nucleatum
NTGDITVGDKI

SEQ ID NO: 3647 - protein, 11 aa, Fusobacterium nucleatum
KEFRLSEDFSI

SEQ ID NO: 3648 - protein, 9 aa, Fusobacterium nucleatum
GSFGIVTVF

SEQ ID NO: 3649 - protein, 9 aa, Fusobacterium nucleatum
DTKVSANNK

SEQ ID NO: 3650 - protein, 9 aa, Fusobacterium nucleatum
YDHWGSEYK

SEQ ID NO: 3651 - protein, 9 aa, Fusobacterium nucleatum
SNGTTIGIY

SEQ ID NO: 3652 - protein, 11 aa, Fusobacterium nucleatum
NSISSSTNGNR

SEQ ID NO: 3653 - protein, 10 aa, Fusobacterium nucleatum
KTLRTSVGVA

SEQ ID NO: 3654 - protein, 9 aa, Fusobacterium nucleatum
KARGILATN

SEQ ID NO: 3655 - protein, 11 aa, Fusobacterium nucleatum
SAKKSAGIIGK

SEQ ID NO: 3656 - protein, 11 aa, Fusobacterium nucleatum
YKYNAYGVAYV

SEQ ID NO: 3657 - protein, 11 aa, Fusobacterium nucleatum
NTVTNTGDITV

SEQ ID NO: 3658 - protein, 9 aa, Fusobacterium nucleatum
LANKRATGI

SEQ ID NO: 3659 - protein, 9 aa, Fusobacterium nucleatum
SFEPAIGIY

SEQ ID NO: 3660 - protein, 10 aa, Fusobacterium nucleatum
KATLDSNTSK

SEQ ID NO: 3661 - protein, 11 aa, Fusobacterium nucleatum
RLSEDFSIRPY

SEQ ID NO: 3662 - protein, 9 aa, Fusobacterium nucleatum
TFNNNGNSA

SEQ ID NO: 3663 - protein, 10 aa, Fusobacterium nucleatum
IGMYGKGVGT

SEQ ID NO: 3664 - protein, 8 aa, Fusobacterium nucleatum
AKYAIGIY

SEQ ID NO: 3665 - protein, 9 aa, Fusobacterium nucleatum
NFTDGLEQR

SEQ ID NO: 3666 - protein, 10 aa, Fusobacterium nucleatum
YSDVSKIVYG

SEQ ID NO: 3667 - protein, 11 aa, Fusobacterium nucleatum
IFHAKSKYYTY

SEQ ID NO: 3668 - protein, 9 aa, Fusobacterium nucleatum
GSTQNTMLY

SEQ ID NO: 3669 - protein, 10 aa, Fusobacterium nucleatum
NKTISVTAEK

SEQ ID NO: 3670 - protein, 9 aa, Fusobacterium nucleatum
EQLQAKVGL

SEQ ID NO: 3671 - protein, 10 aa, Fusobacterium nucleatum
LPYTSFVNKT

SEQ ID NO: 3672 - protein, 11 aa, Fusobacterium nucleatum
GTVTMGNDSVF

SEQ ID NO: 3673 - protein, 10 aa, Fusobacterium nucleatum
DVGQKSIGIY

SEQ ID NO: 3674 - protein, 11 aa, Fusobacterium nucleatum
LSIRPEIGTEL

SEQ ID NO: 3675 - protein, 11 aa, Fusobacterium nucleatum
SSWQFGMNYFY

SEQ ID NO: 3676 - protein, 9 aa, Fusobacterium nucleatum
NLKPRMVLT

SEQ ID NO: 3677 - protein, 11 aa, Fusobacterium nucleatum
YKTDTAGVIDY

SEQ ID NO: 3678 - protein, 8 aa, Fusobacterium nucleatum
KSVGIYAK

SEQ ID NO: 3679 - protein, 10 aa, Fusobacterium nucleatum
KEDRKGNVKV

SEQ ID NO: 3680 - protein, 11 aa, Fusobacterium nucleatum
LENKESVGIFA

SEQ ID NO: 3681 - protein, 11 aa, Fusobacterium nucleatum
FRLSEGFSIRP

SEQ ID NO: 3682 - protein, 11 aa, Fusobacterium nucleatum
SKESAGVYAPK

SEQ ID NO: 3683 - protein, 10 aa, Fusobacterium nucleatum
MAEGIKNHGM

SEQ ID NO: 3684 - protein, 9 aa, Fusobacterium nucleatum
QSNTVRNTV

SEQ ID NO: 3685 - protein, 11 aa, Fusobacterium nucleatum
GKIELEAVSSA

SEQ ID NO: 3686 - protein, 8 aa, Fusobacterium nucleatum
AENSIGFY

SEQ ID NO: 3687 - protein, 8 aa, Fusobacterium nucleatum
SAGIYAPK

SEQ ID NO: 3688 - protein, 10 aa, Fusobacterium nucleatum
TLDTNYSTGM

SEQ ID NO: 3689 - protein, 10 aa, Fusobacterium nucleatum
KTFGMKGEYK

SEQ ID NO: 3690 - protein, 9 aa, Fusobacterium nucleatum
KSAGIYSKK

SEQ ID NO: 3691 - protein, 8 aa, Fusobacterium nucleatum
FADKDSNI

SEQ ID NO: 3692 - protein, 11 aa, Fusobacterium nucleatum
KTLRTSVGVAY

SEQ ID NO: 3693 - protein, 10 aa, Fusobacterium nucleatum
STLLNETTGK

SEQ ID NO: 3694 - protein, 10 aa, Fusobacterium nucleatum
YSNAGSGKTV

SEQ ID NO: 3695 - protein, 10 aa, Fusobacterium nucleatum
TVFNKGVPKN

SEQ ID NO: 3696 - protein, 10 aa, Fusobacterium nucleatum
KEFSHLRNSW

SEQ ID NO: 3697 - protein, 9 aa, Fusobacterium nucleatum
IFGEDNSTL

SEQ ID NO: 3698 - protein, 8 aa, Fusobacterium nucleatum
SSVGMLAK

SEQ ID NO: 3699 - protein, 9 aa, Fusobacterium nucleatum
EIGTELAYK

SEQ ID NO: 3700 - protein, 9 aa, Fusobacterium nucleatum
ILANKATGI

SEQ ID NO: 3701 - protein, 11 aa, Fusobacterium nucleatum
DSALAGANIGK

SEQ ID NO: 3702 - protein, 10 aa, Fusobacterium nucleatum
TGTINLTSSS

SEQ ID NO: 3703 - protein, 9 aa, Fusobacterium nucleatum
SAAEKSTAM

SEQ ID NO: 3704 - protein, 9 aa, Fusobacterium nucleatum
YGIGIKNEI

SEQ ID NO: 3705 - protein, 9 aa, Fusobacterium nucleatum
SGTITMQNK

SEQ ID NO: 3706 - protein, 9 aa, Fusobacterium nucleatum
KNGKPTFLR

SEQ ID NO: 3707 - protein, 10 aa, Fusobacterium nucleatum
NLGMSDIGFY

SEQ ID NO: 3708 - protein, 11 aa, Fusobacterium nucleatum
ISGDIFIGHNK

SEQ ID NO: 3709 - protein, 11 aa, Fusobacterium nucleatum
NTVAATSPSDK

SEQ ID NO: 3710 - protein, 9 aa, Fusobacterium nucleatum
REPTNEVEI

SEQ ID NO: 3711 - protein, 9 aa, Fusobacterium nucleatum
GFYVDTLGR

SEQ ID NO: 3712 - protein, 9 aa, Fusobacterium nucleatum
EAVGVFAGV

SEQ ID NO: 3713 - protein, 9 aa, Fusobacterium nucleatum
AATGTNKDY

SEQ ID NO: 3714 - protein, 10 aa, Fusobacterium nucleatum
TVTSVNDGSI

SEQ ID NO: 3715 - protein, 9 aa, Fusobacterium nucleatum
IYSKTPSNV

SEQ ID NO: 3716 - protein, 10 aa, Fusobacterium nucleatum
GVIDYKYNAY

SEQ ID NO: 3717 - protein, 10 aa, Fusobacterium nucleatum
KQLQAKVGLF

SEQ ID NO: 3718 - protein, 9 aa, Fusobacterium nucleatum
NKKTITLSA

SEQ ID NO: 3719 - protein, 11 aa, Fusobacterium nucleatum
KSVPFDDNNSL

SEQ ID NO: 3720 - protein, 10 aa, Fusobacterium nucleatum
LINAEKIENK

SEQ ID NO: 3721 - protein, 10 aa, Fusobacterium nucleatum
KALKGLRLEL

SEQ ID NO: 3722 - protein, 9 aa, Fusobacterium nucleatum
AISTAVLVA

SEQ ID NO: 3723 - protein, 10 aa, Fusobacterium nucleatum
AVYVSNGGKV

SEQ ID NO: 3724 - protein, 11 aa, Fusobacterium nucleatum
NAGLIAINGTV

SEQ ID NO: 3725 - protein, 10 aa, Fusobacterium nucleatum
VKLEVKHNDY

SEQ ID NO: 3726 - protein, 10 aa, Fusobacterium nucleatum
NITTPITAGK

SEQ ID NO: 3727 - protein, 9 aa, Fusobacterium nucleatum
VENTGKIYL

SEQ ID NO: 3728 - protein, 11 aa, Fusobacterium nucleatum
QRLGVTGNVGY

SEQ ID NO: 3729 - protein, 9 aa, Fusobacterium nucleatum
FGEGASLFY

SEQ ID NO: 3730 - protein, 10 aa, Fusobacterium nucleatum
VSANNKILNM

SEQ ID NO: 3731 - protein, 10 aa, Fusobacterium nucleatum
NKAKVAYTNA

SEQ ID NO: 3732 - protein, 9 aa, Fusobacterium nucleatum
RNFKLTSIA

SEQ ID NO: 3733 - protein, 10 aa, Fusobacterium nucleatum
GIYADAQGTA

SEQ ID NO: 3734 - protein, 9 aa, Fusobacterium nucleatum
MYAENTNLT

SEQ ID NO: 3735 - protein, 9 aa, Fusobacterium nucleatum
KEFRLSEDF

SEQ ID NO: 3736 - protein, 10 aa, Fusobacterium nucleatum
KVGKNSIGIY

SEQ ID NO: 3737 - protein, 9 aa, Fusobacterium nucleatum
TLLNETTGK

SEQ ID NO: 3738 - protein, 10 aa, Fusobacterium nucleatum
NSGTITMQNK

SEQ ID NO: 3739 - protein, 10 aa, Fusobacterium nucleatum
GRVLMKADNR

SEQ ID NO: 3740 - protein, 9 aa, Fusobacterium nucleatum
IGIGLLQEI

SEQ ID NO: 3741 - protein, 8 aa, Fusobacterium nucleatum
GQKSIGIY

SEQ ID NO: 3742 - protein, 8 aa, Fusobacterium nucleatum
SPWSSWQF

SEQ ID NO: 3743 - protein, 11 aa, Fusobacterium nucleatum
KKGSDVDVSHW

SEQ ID NO: 3744 - protein, 11 aa, Fusobacterium nucleatum
MYVENSSATNK

SEQ ID NO: 3745 - protein, 11 aa, Fusobacterium nucleatum
ISLGDASTGMY

SEQ ID NO: 3746 - protein, 11 aa, Fusobacterium nucleatum
STLENHGKILI

SEQ ID NO: 3747 - protein, 9 aa, Fusobacterium nucleatum
TLENHGKIY

SEQ ID NO: 3748 - protein, 8 aa, Fusobacterium nucleatum
SQESAGIY

SEQ ID NO: 3749 - protein, 9 aa, Fusobacterium nucleatum
EVTNSGLVK

SEQ ID NO: 3750 - protein, 9 aa, Fusobacterium nucleatum
GNSALTGVK

SEQ ID NO: 3751 - protein, 9 aa, Fusobacterium nucleatum
SKSSVGMLA

SEQ ID NO: 3752 - protein, 11 aa, Fusobacterium nucleatum
KTDTAGVIDYK

SEQ ID NO: 3753 - protein, 9 aa, Fusobacterium nucleatum
KYKVTNTGS

SEQ ID NO: 3754 - protein, 10 aa, Fusobacterium nucleatum
IAKRYKSVKY

SEQ ID NO: 3755 - protein, 10 aa, Fusobacterium nucleatum
EPTIGIYTAE

SEQ ID NO: 3756 - protein, 10 aa, Fusobacterium nucleatum
IMVVNESTAV

SEQ ID NO: 3757 - protein, 10 aa, Fusobacterium nucleatum
NAPSSAGIQL

SEQ ID NO: 3758 - protein, 9 aa, Fusobacterium nucleatum
GEVKLEVKH

SEQ ID NO: 3759 - protein, 10 aa, Fusobacterium nucleatum
KVRNAMDVAE

SEQ ID NO: 3760 - protein, 10 aa, Fusobacterium nucleatum
GMLGKVKSAV

SEQ ID NO: 3761 - protein, 11 aa, Fusobacterium nucleatum
SESGATKNVGI

SEQ ID NO: 3762 - protein, 11 aa, Fusobacterium nucleatum
KTGSAGIYSII

SEQ ID NO: 3763 - protein, 10 aa, Fusobacterium nucleatum
GTTADWFNIR

SEQ ID NO: 3764 - protein, 9 aa, Fusobacterium nucleatum
AYLENSKFV

SEQ ID NO: 3765 - protein, 11 aa, Fusobacterium nucleatum
IFADKDSNINY

SEQ ID NO: 3766 - protein, 11 aa, Fusobacterium nucleatum
SIVTGKTVTSV

SEQ ID NO: 3767 - protein, 9 aa, Fusobacterium nucleatum
RSEEGRVYI

SEQ ID NO: 3768 - protein, 9 aa, Fusobacterium nucleatum
ELGRVANGK

SEQ ID NO: 3769 - protein, 9 aa, Fusobacterium nucleatum
AADNGGHIV

SEQ ID NO: 3770 - protein, 10 aa, Fusobacterium nucleatum
SLGNDSVFLY

SEQ ID NO: 3771 - protein, 10 aa, Fusobacterium nucleatum
RRGNVKFDLN

SEQ ID NO: 3772 - protein, 10 aa, Fusobacterium nucleatum
AMFINSARGK

SEQ ID NO: 3773 - protein, 8 aa, Fusobacterium nucleatum
LYSNGKAI

SEQ ID NO: 3774 - protein, 10 aa, Fusobacterium nucleatum
DLNIGLDNQR

SEQ ID NO: 3775 - protein, 8 aa, Fusobacterium nucleatum
AENSIGIM

SEQ ID NO: 3776 - protein, 10 aa, Fusobacterium nucleatum
KAKAILDEDY

SEQ ID NO: 3777 - protein, 9 aa, Fusobacterium nucleatum
VKNEIGKEF

SEQ ID NO: 3778 - protein, 9 aa, Fusobacterium nucleatum
STGMYLTNA

SEQ ID NO: 3779 - protein, 10 aa, Fusobacterium nucleatum
EPTNEVEILA

SEQ ID NO: 3780 - protein, 9 aa, Fusobacterium nucleatum
MTTATNINL

SEQ ID NO: 3781 - protein, 10 aa, Fusobacterium nucleatum
TGKVYSDVSK

SEQ ID NO: 3782 - protein, 9 aa, Fusobacterium nucleatum
KIYLDGSRA

SEQ ID NO: 3783 - protein, 11 aa, Fusobacterium nucleatum
MLYLKNSIAQL

SEQ ID NO: 3784 - protein, 9 aa, Fusobacterium nucleatum
LVVDEIFNA

SEQ ID NO: 3785 - protein, 10 aa, Fusobacterium nucleatum
TVSEETSAGM

SEQ ID NO: 3786 - protein, 10 aa, Fusobacterium nucleatum
NEEALLTQAY

SEQ ID NO: 3787 - protein, 11 aa, Fusobacterium nucleatum
YGFYNKDTRKY

SEQ ID NO: 3788 - protein, 10 aa, Fusobacterium nucleatum
KSTAMFINSA

SEQ ID NO: 3789 - protein, 11 aa, Fusobacterium nucleatum
SEVTNSGLVKM

SEQ ID NO: 3790 - protein, 10 aa, Fusobacterium nucleatum
GTINLTASAA

SEQ ID NO: 3791 - protein, 8 aa, Fusobacterium nucleatum
SSAVYVSK

SEQ ID NO: 3792 - protein, 10 aa, Fusobacterium nucleatum
EKNIGILANK

SEQ ID NO: 3793 - protein, 9 aa, Fusobacterium nucleatum
GDAISTAVL

SEQ ID NO: 3794 - protein, 10 aa, Fusobacterium nucleatum
IYAPKANISK

SEQ ID NO: 3795 - protein, 10 aa, Fusobacterium nucleatum
IGMAADNGGY

SEQ ID NO: 3796 - protein, 10 aa, Fusobacterium nucleatum
SALAGANIGK

SEQ ID NO: 3797 - protein, 9 aa, Fusobacterium nucleatum
NKILNMTTA

SEQ ID NO: 3798 - protein, 10 aa, Fusobacterium nucleatum
RYKSVKYSLG

SEQ ID NO: 3799 - protein, 10 aa, Fusobacterium nucleatum
GQDSINANNK

SEQ ID NO: 3800 - protein, 10 aa, Fusobacterium nucleatum
EEVNTEQMKA

SEQ ID NO: 3801 - protein, 9 aa, Fusobacterium nucleatum
DVADGYTGA

SEQ ID NO: 3802 - protein, 8 aa, Fusobacterium nucleatum
YLENSKFV

SEQ ID NO: 3803 - protein, 11 aa, Fusobacterium nucleatum
NEKNIGILANK

SEQ ID NO: 3804 - protein, 11 aa, Fusobacterium nucleatum
VSNAESITGTK

SEQ ID NO: 3805 - protein, 10 aa, Fusobacterium nucleatum
KGTISLDGSR

SEQ ID NO: 3806 - protein, 9 aa, Fusobacterium nucleatum
EAPAVNPQV

SEQ ID NO: 3807 - protein, 11 aa, Fusobacterium nucleatum
VTNSPLLSKYL

SEQ ID NO: 3808 - protein, 11 aa, Fusobacterium nucleatum
KEESSVGIYSK

SEQ ID NO: 3809 - protein, 10 aa, Fusobacterium nucleatum
KPRMVLTHVI

SEQ ID NO: 3810 - protein, 10 aa, Fusobacterium nucleatum
NVEIASGKKL

SEQ ID NO: 3811 - protein, 11 aa, Fusobacterium nucleatum
SSAVYVSNGGK

SEQ ID NO: 3812 - protein, 9 aa, Fusobacterium nucleatum
LSTSVGVAY

SEQ ID NO: 3813 - protein, 9 aa, Fusobacterium nucleatum
LENKESVGI

SEQ ID NO: 3814 - protein, 10 aa, Fusobacterium nucleatum
LTASAATNEK

SEQ ID NO: 3815 - protein, 8 aa, Fusobacterium nucleatum
SPSVAMYA

SEQ ID NO: 3816 - protein, 9 aa, Fusobacterium nucleatum
KEKSGEMKL

SEQ ID NO: 3817 - protein, 11 aa, Fusobacterium nucleatum
GFILNNTDVNK

SEQ ID NO: 3818 - protein, 8 aa, Fusobacterium nucleatum
IQSMTGVY

SEQ ID NO: 3819 - protein, 8 aa, Fusobacterium nucleatum
MEQGNQVV

SEQ ID NO: 3820 - protein, 9 aa, Fusobacterium nucleatum
GLLQEIQEV

SEQ ID NO: 3821 - protein, 10 aa, Fusobacterium nucleatum
NSFEPAIGIY

SEQ ID NO: 3822 - protein, 10 aa, Fusobacterium nucleatum
KKSAGIIGKL

SEQ ID NO: 3823 - protein, 10 aa, Fusobacterium nucleatum
DEIFHAKSKY

SEQ ID NO: 3824 - protein, 10 aa, Fusobacterium nucleatum
INTKKSVGMY

SEQ ID NO: 3825 - protein, 8 aa, Fusobacterium nucleatum
GEGASLFY

SEQ ID NO: 3826 - protein, 10 aa, Fusobacterium nucleatum
KNNGTLISTR

SEQ ID NO: 3827 - protein, 11 aa, Fusobacterium nucleatum
KKTSAGILAEI

SEQ ID NO: 3828 - protein, 8 aa, Fusobacterium nucleatum
KEEMSAGM

SEQ ID NO: 3829 - protein, 10 aa, Fusobacterium nucleatum
VLDGTNASNK

SEQ ID NO: 3830 - protein, 11 aa, Fusobacterium nucleatum
NNKTITLSGEK

SEQ ID NO: 3831 - protein, 10 aa, Fusobacterium nucleatum
GMAADNGGHI

SEQ ID NO: 3832 - protein, 10 aa, Fusobacterium nucleatum
TNSNLTNNSK

SEQ ID NO: 3833 - protein, 11 aa, Fusobacterium nucleatum
ASRNTTMSHMI

SEQ ID NO: 3834 - protein, 10 aa, Fusobacterium nucleatum
SEIIVNKEAS

SEQ ID NO: 3835 - protein, 11 aa, Fusobacterium nucleatum
GSAGVLAEKYK

SEQ ID NO: 3836 - protein, 9 aa, Fusobacterium nucleatum
KEFSHLRNS

SEQ ID NO: 3837 - protein, 10 aa, Fusobacterium nucleatum
AMAKLPYTSF

SEQ ID NO: 3838 - protein, 9 aa, Fusobacterium nucleatum
GATGGKVTL

SEQ ID NO: 3839 - protein, 9 aa, Fusobacterium nucleatum
IVATSIGKR

SEQ ID NO: 3840 - protein, 9 aa, Fusobacterium nucleatum
ESGKTASVK

SEQ ID NO: 3841 - protein, 10 aa, Fusobacterium nucleatum
TTDSKITVGK

SEQ ID NO: 3842 - protein, 9 aa, Fusobacterium nucleatum
NANNKNLTM

SEQ ID NO: 3843 - protein, 9 aa, Fusobacterium nucleatum
IGIYAQGNY

SEQ ID NO: 3844 - protein, 10 aa, Fusobacterium nucleatum
SKDSNKVKTF

SEQ ID NO: 3845 - protein, 9 aa, Fusobacterium nucleatum
RGNWKVRNA

SEQ ID NO: 3846 - protein, 10 aa, Fusobacterium nucleatum
LGKNSTFGLL

SEQ ID NO: 3847 - protein, 8 aa, Fusobacterium nucleatum
ATQNTMLY

SEQ ID NO: 3848 - protein, 11 aa, Fusobacterium nucleatum
RIYNNKSIGMY

SEQ ID NO: 3849 - protein, 10 aa, Fusobacterium nucleatum
ASHLIAFYIK

SEQ ID NO: 3850 - protein, 10 aa, Fusobacterium nucleatum
VAMYAENTNL

SEQ ID NO: 3851 - protein, 11 aa, Fusobacterium nucleatum
TLEAPAVNPQV

SEQ ID NO: 3852 - protein, 10 aa, Fusobacterium nucleatum
TNAGKIALEK

SEQ ID NO: 3853 - protein, 9 aa, Fusobacterium nucleatum
KKATGIFGK

SEQ ID NO: 3854 - protein, 8 aa, Fusobacterium nucleatum
INNSKISL

SEQ ID NO: 3855 - protein, 9 aa, Fusobacterium nucleatum
HQYANVQQR

SEQ ID NO: 3856 - protein, 10 aa, Fusobacterium nucleatum
EIIVNKEASV

SEQ ID NO: 3857 - protein, 10 aa, Fusobacterium nucleatum
AMFINSARAK

SEQ ID NO: 3858 - protein, 9 aa, Fusobacterium nucleatum
KTDNAWNFA

SEQ ID NO: 3859 - protein, 9 aa, Fusobacterium nucleatum
MAADNGGHI

SEQ ID NO: 3860 - protein, 10 aa, Fusobacterium nucleatum
APSAPTAPNA

SEQ ID NO: 3861 - protein, 11 aa, Fusobacterium nucleatum
TSFVKKTDNAW

SEQ ID NO: 3862 - protein, 10 aa, Fusobacterium nucleatum
TPGNDSLNSW

SEQ ID NO: 3863 - protein, 9 aa, Fusobacterium nucleatum
KVEYGRVSK

SEQ ID NO: 3864 - protein, 10 aa, Fusobacterium nucleatum
LVKMSAENSI

SEQ ID NO: 3865 - protein, 9 aa, Fusobacterium nucleatum
QGVGVYGKK

SEQ ID NO: 3866 - protein, 10 aa, Fusobacterium nucleatum
NMTTATNINL

SEQ ID NO: 3867 - protein, 8 aa, Fusobacterium nucleatum
EESSVGIY

SEQ ID NO: 3868 - protein, 9 aa, Fusobacterium nucleatum
IENTGNIEV

SEQ ID NO: 3869 - protein, 11 aa, Fusobacterium nucleatum
AKVAYTNADWF

SEQ ID NO: 3870 - protein, 10 aa, Fusobacterium nucleatum
KVGLFKSVPF

SEQ ID NO: 3871 - protein, 10 aa, Fusobacterium nucleatum
KISLSGAESI

SEQ ID NO: 3872 - protein, 11 aa, Fusobacterium nucleatum
TGWYTGIVHNR

SEQ ID NO: 3873 - protein, 9 aa, Fusobacterium nucleatum
YKVTNGDAI

SEQ ID NO: 3874 - protein, 11 aa, Fusobacterium nucleatum
TAGTGIFITKK

SEQ ID NO: 3875 - protein, 8 aa, Fusobacterium nucleatum
AKKSTGIF

SEQ ID NO: 3876 - protein, 11 aa, Fusobacterium nucleatum
KVYSDVSKIVY

SEQ ID NO: 3877 - protein, 8 aa, Fusobacterium nucleatum
KENLKNSV

SEQ ID NO: 3878 - protein, 10 aa, Fusobacterium nucleatum
IREKSGEVKL

SEQ ID NO: 3879 - protein, 9 aa, Fusobacterium nucleatum
IGEKAVGLY

SEQ ID NO: 3880 - protein, 11 aa, Fusobacterium nucleatum
TQDEESAGMYV

SEQ ID NO: 3881 - protein, 9 aa, Fusobacterium nucleatum
TTVNVTALT

SEQ ID NO: 3882 - protein, 10 aa, Fusobacterium nucleatum
TTFNGGNATI

SEQ ID NO: 3883 - protein, 8 aa, Fusobacterium nucleatum
KEESSVGI

SEQ ID NO: 3884 - protein, 9 aa, Fusobacterium nucleatum
TTVENKGTI

SEQ ID NO: 3885 - protein, 11 aa, Fusobacterium nucleatum
GIYSKINSSSI

SEQ ID NO: 3886 - protein, 11 aa, Fusobacterium nucleatum
KRYKSVKYSLG

SEQ ID NO: 3887 - protein, 10 aa, Fusobacterium nucleatum
TAMFINSARA

SEQ ID NO: 3888 - protein, 9 aa, Fusobacterium nucleatum
SEPTGVYAV

SEQ ID NO: 3889 - protein, 9 aa, Fusobacterium nucleatum
ILNNTDVNK

SEQ ID NO: 3890 - protein, 11 aa, Fusobacterium nucleatum
EVEQIGKLIGK

SEQ ID NO: 3891 - protein, 11 aa, Fusobacterium nucleatum
SAVYVSNGGKV

SEQ ID NO: 3892 - protein, 8 aa, Fusobacterium nucleatum
NSNHLIAF

SEQ ID NO: 3893 - protein, 10 aa, Fusobacterium nucleatum
APTAPNAPSI

SEQ ID NO: 3894 - protein, 10 aa, Fusobacterium nucleatum
HLRNSWSNPS

SEQ ID NO: 3895 - protein, 10 aa, Fusobacterium nucleatum
AKDSEPTGVY

SEQ ID NO: 3896 - protein, 8 aa, Fusobacterium nucleatum
GKNSIGIY

SEQ ID NO: 3897 - protein, 10 aa, Fusobacterium nucleatum
SAVTASTAKL

SEQ ID NO: 3898 - protein, 10 aa, Fusobacterium nucleatum
NLRLELIQLM

SEQ ID NO: 3899 - protein, 10 aa, Fusobacterium nucleatum
GRISLSNSSI

SEQ ID NO: 3900 - protein, 11 aa, Fusobacterium nucleatum
WNFTDGLEQRY

SEQ ID NO: 3901 - protein, 8 aa, Fusobacterium nucleatum
DEMMGHQY

SEQ ID NO: 3902 - protein, 9 aa, Fusobacterium nucleatum
MLAKEGSNI

SEQ ID NO: 3903 - protein, 9 aa, Fusobacterium nucleatum
VEKRIFNKL

SEQ ID NO: 3904 - protein, 9 aa, Fusobacterium nucleatum
AKRYKSVKY

SEQ ID NO: 3905 - protein, 10 aa, Fusobacterium nucleatum
GIIDFSAAEK

SEQ ID NO: 3906 - protein, 10 aa, Fusobacterium nucleatum
SQSFENKANI

SEQ ID NO: 3907 - protein, 9 aa, Fusobacterium nucleatum
VINSGRISL

SEQ ID NO: 3908 - protein, 10 aa, Fusobacterium nucleatum
LKPRMVLTHV

SEQ ID NO: 3909 - protein, 10 aa, Fusobacterium nucleatum
GVFLKGSQSF

SEQ ID NO: 3910 - protein, 9 aa, Fusobacterium nucleatum
TSHESLIGM

SEQ ID NO: 3911 - protein, 9 aa, Fusobacterium nucleatum
VENKGTISL

SEQ ID NO: 3912 - protein, 9 aa, Fusobacterium nucleatum
VVNNGELTI

SEQ ID NO: 3913 - protein, 8 aa, Fusobacterium nucleatum
FLMLGVSA

SEQ ID NO: 3914 - protein, 10 aa, Fusobacterium nucleatum
IYAVNGQDSI

SEQ ID NO: 3915 - protein, 8 aa, Fusobacterium nucleatum
KVKSAVTA

SEQ ID NO: 3916 - protein, 11 aa, Fusobacterium nucleatum
GKVTLGSNTIK

SEQ ID NO: 3917 - protein, 11 aa, Fusobacterium nucleatum
GTKTLRTSVGV

SEQ ID NO: 3918 - protein, 10 aa, Fusobacterium nucleatum
EQIAFGFNNA

SEQ ID NO: 3919 - protein, 11 aa, Fusobacterium nucleatum
TSLEVAYENEL

SEQ ID NO: 3920 - protein, 8 aa, Fusobacterium nucleatum
AYTNADWF

SEQ ID NO: 3921 - protein, 9 aa, Fusobacterium nucleatum
SIIENGATK

SEQ ID NO: 3922 - protein, 9 aa, Fusobacterium nucleatum
IAGKKTLGV

SEQ ID NO: 3923 - protein, 9 aa, Fusobacterium nucleatum
TLRTSLEVA

SEQ ID NO: 3924 - protein, 9 aa, Fusobacterium nucleatum
KATNTSGGV

SEQ ID NO: 3925 - protein, 10 aa, Fusobacterium nucleatum
SAKNSGTINL

SEQ ID NO: 3926 - protein, 11 aa, Fusobacterium nucleatum
IGTELAYRHYF

SEQ ID NO: 3927 - protein, 8 aa, Fusobacterium nucleatum
KESLIGMF

SEQ ID NO: 3928 - protein, 10 aa, Fusobacterium nucleatum
TNTIKLKGTK

SEQ ID NO: 3929 - protein, 9 aa, Fusobacterium nucleatum
NHGIIDFSA

SEQ ID NO: 3930 - protein, 9 aa, Fusobacterium nucleatum
TAMFINSAR

SEQ ID NO: 3931 - protein, 9 aa, Fusobacterium nucleatum
SKTPSNVEI

SEQ ID NO: 3932 - protein, 9 aa, Fusobacterium nucleatum
KEGGAKLTI

SEQ ID NO: 3933 - protein, 8 aa, Fusobacterium nucleatum
NKMHRKFL

SEQ ID NO: 3934 - protein, 9 aa, Fusobacterium nucleatum
SAGVLAEKY

SEQ ID NO: 3935 - protein, 9 aa, Fusobacterium nucleatum
TIKESLIGM

SEQ ID NO: 3936 - protein, 10 aa, Fusobacterium nucleatum
KVDMDVADGY

SEQ ID NO: 3937 - protein, 10 aa, Fusobacterium nucleatum
SLKATNKGTI

SEQ ID NO: 3938 - protein, 11 aa, Fusobacterium nucleatum
YSDVSKIVYGI

SEQ ID NO: 3939 - protein, 9 aa, Fusobacterium nucleatum
AIASEGTEF

SEQ ID NO: 3940 - protein, 8 aa, Fusobacterium nucleatum
SPLLSKYL

SEQ ID NO: 3941 - protein, 11 aa, Fusobacterium nucleatum
TAMFINSARAK

SEQ ID NO: 3942 - protein, 9 aa, Fusobacterium nucleatum
STSVGVAYE

SEQ ID NO: 3943 - protein, 9 aa, Fusobacterium nucleatum
KVEEAVGVF

SEQ ID NO: 3944 - protein, 10 aa, Fusobacterium nucleatum
FIKDEKSVGI

SEQ ID NO: 3945 - protein, 9 aa, Fusobacterium nucleatum
TPYNITTPI

SEQ ID NO: 3946 - protein, 11 aa, Fusobacterium nucleatum
HINGNKNLKPR

SEQ ID NO: 3947 - protein, 11 aa, Fusobacterium nucleatum
GIYAPKSNISK

SEQ ID NO: 3948 - protein, 9 aa, Fusobacterium nucleatum
RGDKPQKYL

SEQ ID NO: 3949 - protein, 10 aa, Fusobacterium nucleatum
KIKNLRLELI

SEQ ID NO: 3950 - protein, 11 aa, Fusobacterium nucleatum
TVKNGKPTFLR

SEQ ID NO: 3951 - protein, 10 aa, Fusobacterium nucleatum
MTWQEGNFEA

SEQ ID NO: 3952 - protein, 10 aa, Fusobacterium nucleatum
KLETNTNAGL

SEQ ID NO: 3953 - protein, 10 aa, Fusobacterium nucleatum
GIIGKLGSEI

SEQ ID NO: 3954 - protein, 11 aa, Fusobacterium nucleatum
MTIWQEGNFEA

SEQ ID NO: 3955 - protein, 10 aa, Fusobacterium nucleatum
ETSAGMLGKV

SEQ ID NO: 3956 - protein, 10 aa, Fusobacterium nucleatum
ATKNVGIYAV

SEQ ID NO: 3957 - protein, 11 aa, Fusobacterium nucleatum
KGETDIQSYIK

SEQ ID NO: 3958 - protein, 9 aa, Fusobacterium nucleatum
FVKKTDNAW

SEQ ID NO: 3959 - protein, 9 aa, Fusobacterium nucleatum
TSSSATNEK

SEQ ID NO: 3960 - protein, 10 aa, Fusobacterium nucleatum
EKSVGIYSKI

SEQ ID NO: 3961 - protein, 10 aa, Fusobacterium nucleatum
RTKPIDIDGA

SEQ ID NO: 3962 - protein, 9 aa, Fusobacterium nucleatum
RVAYYVNGK

SEQ ID NO: 3963 - protein, 10 aa, Fusobacterium nucleatum
AAEKSTAMFI

SEQ ID NO: 3964 - protein, 10 aa, Fusobacterium nucleatum
AQVDDQASKI

SEQ ID NO: 3965 - protein, 9 aa, Fusobacterium nucleatum
GATDDIDPM

SEQ ID NO: 3966 - protein, 11 aa, Fusobacterium nucleatum
IETTSNSKISL

SEQ ID NO: 3967 - protein, 9 aa, Fusobacterium nucleatum
RENLRNSVG

SEQ ID NO: 3968 - protein, 11 aa, Fusobacterium nucleatum
EVGTELAYRHY

SEQ ID NO: 3969 - protein, 9 aa, Fusobacterium nucleatum
MYATNANVT

SEQ ID NO: 3970 - protein, 8 aa, Fusobacterium nucleatum
TSTGTITL

SEQ ID NO: 3971 - protein, 10 aa, Fusobacterium nucleatum
RHYFGIKTLR

SEQ ID NO: 3972 - protein, 9 aa, Fusobacterium nucleatum
QSYTKGIKV

SEQ ID NO: 3973 - protein, 10 aa, Fusobacterium nucleatum
IVNEGEIRIY

SEQ ID NO: 3974 - protein, 11 aa, Fusobacterium nucleatum
TGIPNSNVKAL

SEQ ID NO: 3975 - protein, 10 aa, Fusobacterium nucleatum
GLIAINGTVG

SEQ ID NO: 3976 - protein, 9 aa, Fusobacterium nucleatum
EAPDVNPQV

SEQ ID NO: 3977 - protein, 10 aa, Fusobacterium nucleatum
GTPYNITTPI

SEQ ID NO: 3978 - protein, 8 aa, Fusobacterium nucleatum
AAEKSTAM

SEQ ID NO: 3979 - protein, 11 aa, Fusobacterium nucleatum
KSVKYSLGLAI

SEQ ID NO: 3980 - protein, 11 aa, Fusobacterium nucleatum
NTEQMKAVPTR

SEQ ID NO: 3981 - protein, 9 aa, Fusobacterium nucleatum
TLDKNTSKL

SEQ ID NO: 3982 - protein, 10 aa, Fusobacterium nucleatum
FENKANINIA

SEQ ID NO: 3983 - protein, 8 aa, Fusobacterium nucleatum
YTYGIGIK

SEQ ID NO: 3984 - protein, 9 aa, Fusobacterium nucleatum
ITNNKTITL

SEQ ID NO: 3985 - protein, 8 aa, Fusobacterium nucleatum
GEYKTDTA

SEQ ID NO: 3986 - protein, 9 aa, Fusobacterium nucleatum
KLERKFLVV

SEQ ID NO: 3987 - protein, 10 aa, Fusobacterium nucleatum
ANVEIASGKK

SEQ ID NO: 3988 - protein, 11 aa, Fusobacterium nucleatum
KYLNNNTSDKI

SEQ ID NO: 3989 - protein, 9 aa, Fusobacterium nucleatum
GYNKMHRKF

SEQ ID NO: 3990 - protein, 9 aa, Fusobacterium nucleatum
KSGEVKLEV

SEQ ID NO: 3991 - protein, 9 aa, Fusobacterium nucleatum
LMLGVGAFS

SEQ ID NO: 3992 - protein, 9 aa, Fusobacterium nucleatum
NIVSFGEGA

SEQ ID NO: 3993 - protein, 8 aa, Fusobacterium nucleatum
QFGMNYFY

SEQ ID NO: 3994 - protein, 11 aa, Fusobacterium nucleatum
ARGILGVNSNF

SEQ ID NO: 3995 - protein, 8 aa, Fusobacterium nucleatum
DEKSVGIY

SEQ ID NO: 3996 - protein, 10 aa, Fusobacterium nucleatum
KLKGTKGVVA

SEQ ID NO: 3997 - protein, 11 aa, Fusobacterium nucleatum
DGKSAGIYSKK

SEQ ID NO: 3998 - protein, 10 aa, Fusobacterium nucleatum
YATLKAKAIL

SEQ ID NO: 3999 - protein, 9 aa, Fusobacterium nucleatum
IELEAVSSA

SEQ ID NO: 4000 - protein, 9 aa, Fusobacterium nucleatum
LFLKDANFV

SEQ ID NO: 4001 - protein, 9 aa, Fusobacterium nucleatum
GIFVSETGV

SEQ ID NO: 4002 - protein, 9 aa, Fusobacterium nucleatum
NWTISGDMF

SEQ ID NO: 4003 - protein, 9 aa, Fusobacterium nucleatum
APKSNISKV

SEQ ID NO: 4004 - protein, 10 aa, Fusobacterium nucleatum
EQLQAKVGLF

SEQ ID NO: 4005 - protein, 8 aa, Fusobacterium nucleatum
LADKATGI

SEQ ID NO: 4006 - protein, 11 aa, Fusobacterium nucleatum
HESLIGMFAQA

SEQ ID NO: 4007 - protein, 10 aa, Fusobacterium nucleatum
TESDVTNSGK

SEQ ID NO: 4008 - protein, 10 aa, Fusobacterium nucleatum
TSHESLIGMF

SEQ ID NO: 4009 - protein, 9 aa, Fusobacterium nucleatum
RHYFGTKTL

SEQ ID NO: 4010 - protein, 9 aa, Fusobacterium nucleatum
KTGSAGIYS

SEQ ID NO: 4011 - protein, 10 aa, Fusobacterium nucleatum
GLYSADPTKF

SEQ ID NO: 4012 - protein, 9 aa, Fusobacterium nucleatum
NTNAGLIAI

SEQ ID NO: 4013 - protein, 9 aa, Fusobacterium nucleatum
KIKNLRLEL

SEQ ID NO: 4014 - protein, 9 aa, Fusobacterium nucleatum
DMFVGYNKM

SEQ ID NO: 4015 - protein, 9 aa, Fusobacterium nucleatum
YIKNDGEIR

SEQ ID NO: 4016 - protein, 11 aa, Fusobacterium nucleatum
KLGSEIINSGI

SEQ ID NO: 4017 - protein, 9 aa, Fusobacterium nucleatum
VYVDDGAKF

SEQ ID NO: 4018 - protein, 10 aa, Fusobacterium nucleatum
VYTDVSKIVY

SEQ ID NO: 4019 - protein, 9 aa, Fusobacterium nucleatum
KESAGVYAP

SEQ ID NO: 4020 - protein, 11 aa, Fusobacterium nucleatum
MTGSPSVAMYA

SEQ ID NO: 4021 - protein, 11 aa, Fusobacterium nucleatum
QLIIGTEYSEK

SEQ ID NO: 4022 - protein, 11 aa, Fusobacterium nucleatum
GVVGISLNNSK

SEQ ID NO: 4023 - protein, 10 aa, Fusobacterium nucleatum
SGTNGIIVSA

SEQ ID NO: 4024 - protein, 10 aa, Fusobacterium nucleatum
YTGIVHNRFK

SEQ ID NO: 4025 - protein, 10 aa, Fusobacterium nucleatum
TSGTIEVGEK

SEQ ID NO: 4026 - protein, 9 aa, Fusobacterium nucleatum
KPIDIDGAT

SEQ ID NO: 4027 - protein, 9 aa, Fusobacterium nucleatum
AMDVAENQR

SEQ ID NO: 4028 - protein, 11 aa, Fusobacterium nucleatum
KPEVGTELAYR

SEQ ID NO: 4029 - protein, 9 aa, Fusobacterium nucleatum
NRNWGLVDL

SEQ ID NO: 4030 - protein, 11 aa, Fusobacterium nucleatum
NTKDINVNTKK

SEQ ID NO: 4031 - protein, 11 aa, Fusobacterium nucleatum
NDSVFLYSNGK

SEQ ID NO: 4032 - protein, 9 aa, Fusobacterium nucleatum
KEEMSAGMY

SEQ ID NO: 4033 - protein, 10 aa, Fusobacterium nucleatum
IFIGHNKLER

SEQ ID NO: 4034 - protein, 10 aa, Fusobacterium nucleatum
LEQRYDMNAL

SEQ ID NO: 4035 - protein, 9 aa, Fusobacterium nucleatum
STTNSNVEM

SEQ ID NO: 4036 - protein, 8 aa, Fusobacterium nucleatum
NVTANNNR

SEQ ID NO: 4037 - protein, 10 aa, Fusobacterium nucleatum
NFADGLEQRY

SEQ ID NO: 4038 - protein, 11 aa, Fusobacterium nucleatum
NKTISVTAEKG

SEQ ID NO: 4039 - protein, 10 aa, Fusobacterium nucleatum
KQWFVKGDVI

SEQ ID NO: 4040 - protein, 9 aa, Fusobacterium nucleatum
EAVSSAGVY

SEQ ID NO: 4041 - protein, 8 aa, Fusobacterium nucleatum
KTITLSAK

SEQ ID NO: 4042 - protein, 11 aa, Fusobacterium nucleatum
YTSFVNKTDNA

SEQ ID NO: 4043 - protein, 10 aa, Fusobacterium nucleatum
NGETSIVTGK

SEQ ID NO: 4044 - protein, 10 aa, Fusobacterium nucleatum
AENTGTINLT

SEQ ID NO: 4045 - protein, 9 aa, Fusobacterium nucleatum
SANSLEPTI

SEQ ID NO: 4046 - protein, 11 aa, Fusobacterium nucleatum
AGKKTLGVFLK

SEQ ID NO: 4047 - protein, 11 aa, Fusobacterium nucleatum
EGASIFYATLK

SEQ ID NO: 4048 - protein, 9 aa, Fusobacterium nucleatum
TFNGGNATI

SEQ ID NO: 4049 - protein, 11 aa, Fusobacterium nucleatum
IYAKETSISSV

SEQ ID NO: 4050 - protein, 9 aa, Fusobacterium nucleatum
SSSLKATNK

SEQ ID NO: 4051 - protein, 9 aa, Fusobacterium nucleatum
IYSKGNNKI

SEQ ID NO: 4052 - protein, 9 aa, Fusobacterium nucleatum
KEEQLQAKV

SEQ ID NO: 4053 - protein, 9 aa, Fusobacterium nucleatum
KDSEPTGVY

SEQ ID NO: 4054 - protein, 9 aa, Fusobacterium nucleatum
SNKGVLAYL

SEQ ID NO: 4055 - protein, 10 aa, Fusobacterium nucleatum
NLCKVEKDLR

SEQ ID NO: 4056 - protein, 9 aa, Fusobacterium nucleatum
KMHRKFLVV

SEQ ID NO: 4057 - protein, 9 aa, Fusobacterium nucleatum
ILADKATGI

SEQ ID NO: 4058 - protein, 11 aa, Fusobacterium nucleatum
VVLDGTNASNK

SEQ ID NO: 4059 - protein, 9 aa, Fusobacterium nucleatum
LTNNSKISL

SEQ ID NO: 4060 - protein, 10 aa, Fusobacterium nucleatum
NYGQITGVAM

SEQ ID NO: 4061 - protein, 9 aa, Fusobacterium nucleatum
KEAVGIFAK

SEQ ID NO: 4062 - protein, 10 aa, Fusobacterium nucleatum
VQGVGVYGKK

SEQ ID NO: 4063 - protein, 9 aa, Fusobacterium nucleatum
NHGTIDFSA

SEQ ID NO: 4064 - protein, 9 aa, Fusobacterium nucleatum
EIETTSNSK

SEQ ID NO: 4065 - protein, 11 aa, Fusobacterium nucleatum
NTKKSVGIYAK

SEQ ID NO: 4066 - protein, 10 aa, Fusobacterium nucleatum
KFKDIGNSKE

SEQ ID NO: 4067 - protein, 10 aa, Fusobacterium nucleatum
DSVEKRIFNK

SEQ ID NO: 4068 - protein, 10 aa, Fusobacterium nucleatum
FADKDSNINY

SEQ ID NO: 4069 - protein, 8 aa, Fusobacterium nucleatum
KANIINNR

SEQ ID NO: 4070 - protein, 10 aa, Fusobacterium nucleatum
NVKFDLNVGL

SEQ ID NO: 4071 - protein, 11 aa, Fusobacterium nucleatum
IGKEFRLSEGF

SEQ ID NO: 4072 - protein, 8 aa, Fusobacterium nucleatum
ATNKGRVY

SEQ ID NO: 4073 - protein, 9 aa, Fusobacterium nucleatum
AGTGIFITK

SEQ ID NO: 4074 - protein, 8 aa, Fusobacterium nucleatum
NVTALTNR

SEQ ID NO: 4075 - protein, 11 aa, Fusobacterium nucleatum
VTVFNKGVPKN

SEQ ID NO: 4076 - protein, 9 aa, Fusobacterium nucleatum
NENVTGLAG

SEQ ID NO: 4077 - protein, 10 aa, Fusobacterium nucleatum
RPEIGTELAY

SEQ ID NO: 4078 - protein, 11 aa, Fusobacterium nucleatum
YSLGLAILFLM

SEQ ID NO: 4079 - protein, 8 aa, Fusobacterium nucleatum
QEIQEVKL

SEQ ID NO: 4080 - protein, 10 aa, Fusobacterium nucleatum
DGTTAGTGIF

SEQ ID NO: 4081 - protein, 10 aa, Fusobacterium nucleatum
LIAINGTVGF

SEQ ID NO: 4082 - protein, 9 aa, Fusobacterium nucleatum
SNINYTGNM

SEQ ID NO: 4083 - protein, 9 aa, Fusobacterium nucleatum
SEPTAVYAV

SEQ ID NO: 4084 - protein, 9 aa, Fusobacterium nucleatum
YSKGQSYTV

SEQ ID NO: 4085 - protein, 11 aa, Fusobacterium nucleatum
RATATNKIQSM

SEQ ID NO: 4086 - protein, 11 aa, Fusobacterium nucleatum
MTGVYVDDGAK

SEQ ID NO: 4087 - protein, 11 aa, Fusobacterium nucleatum
GFYVDTLGRTK

SEQ ID NO: 4088 - protein, 9 aa, Fusobacterium nucleatum
GIYTRGNWK

SEQ ID NO: 4089 - protein, 9 aa, Fusobacterium nucleatum
MTTAANIAL

SEQ ID NO: 4090 - protein, 9 aa, Fusobacterium nucleatum
AMAKLPYTS

SEQ ID NO: 4091 - protein, 9 aa, Fusobacterium nucleatum
NKEASVGIY

SEQ ID NO: 4092 - protein, 11 aa, Fusobacterium nucleatum
YRHYFGIKTLR

SEQ ID NO: 4093 - protein, 10 aa, Fusobacterium nucleatum
IDADNSYGVI

SEQ ID NO: 4094 - protein, 10 aa, Fusobacterium nucleatum
FYATSKAKAI

SEQ ID NO: 4095 - protein, 9 aa, Fusobacterium nucleatum
AILFLMLGV

SEQ ID NO: 4096 - protein, 11 aa, Fusobacterium nucleatum
FVNKTDNAWNF

SEQ ID NO: 4097 - protein, 10 aa, Fusobacterium nucleatum
KKTITANGKK

SEQ ID NO: 4098 - protein, 10 aa, Fusobacterium nucleatum
YLFNGIYTRG

SEQ ID NO: 4099 - protein, 10 aa, Fusobacterium nucleatum
GHNVRGGVGL

SEQ ID NO: 4100 - protein, 10 aa, Fusobacterium nucleatum
KPEVGTELAY

SEQ ID NO: 4101 - protein, 10 aa, Fusobacterium nucleatum
LSDSKYTSGV

SEQ ID NO: 4102 - protein, 9 aa, Fusobacterium nucleatum
RSIAKRYKS

SEQ ID NO: 4103 - protein, 10 aa, Fusobacterium nucleatum
TVPRSNPSDK

SEQ ID NO: 4104 - protein, 9 aa, Fusobacterium nucleatum
KNYGEIKVR

SEQ ID NO: 4105 - protein, 11 aa, Fusobacterium nucleatum
YLENSKFISHL

SEQ ID NO: 4106 - protein, 11 aa, Fusobacterium nucleatum
KEEQLQAKVGL

SEQ ID NO: 4107 - protein, 9 aa, Fusobacterium nucleatum
NKDYEGVTI

SEQ ID NO: 4108 - protein, 10 aa, Fusobacterium nucleatum
FNIRGEKEDR

SEQ ID NO: 4109 - protein, 10 aa, Fusobacterium nucleatum
EVAQKASAGI

SEQ ID NO: 4110 - protein, 8 aa, Fusobacterium nucleatum
VTNNSATL

SEQ ID NO: 4111 - protein, 10 aa, Fusobacterium nucleatum
VTNNSATLTL

SEQ ID NO: 4112 - protein, 11 aa, Fusobacterium nucleatum
KINFTNTGNIY

SEQ ID NO: 4113 - protein, 11 aa, Fusobacterium nucleatum
KSAGMLGSEGK

SEQ ID NO: 4114 - protein, 10 aa, Fusobacterium nucleatum
SLGLAILFLM

SEQ ID NO: 4115 - protein, 11 aa, Fusobacterium nucleatum
KITGSPSVAMY

SEQ ID NO: 4116 - protein, 9 aa, Fusobacterium nucleatum
VDAAYSTGM

SEQ ID NO: 4117 - protein, 10 aa, Fusobacterium nucleatum
YGRVSKIREK

SEQ ID NO: 4118 - protein, 10 aa, Fusobacterium nucleatum
GVYAVNGAQV

SEQ ID NO: 4119 - protein, 10 aa, Fusobacterium nucleatum
KEPTNEVEIL

SEQ ID NO: 4120 - protein, 11 aa, Fusobacterium nucleatum
STADNNDTINV

SEQ ID NO: 4121 - protein, 9 aa, Fusobacterium nucleatum
YAIGIYADA

SEQ ID NO: 4122 - protein, 9 aa, Fusobacterium nucleatum
AYVHENEDI

SEQ ID NO: 4123 - protein, 9 aa, Fusobacterium nucleatum
QKYLFNGIY

SEQ ID NO: 4124 - protein, 11 aa, Fusobacterium nucleatum
KNLTMTTAANI

SEQ ID NO: 4125 - protein, 10 aa, Fusobacterium nucleatum
LGMLAQNNGK

SEQ ID NO: 4126 - protein, 11 aa, Fusobacterium nucleatum
GMYGKGIGTTV

SEQ ID NO: 4127 - protein, 10 aa, Fusobacterium nucleatum
WQFGMNYFYD

SEQ ID NO: 4128 - protein, 9 aa, Fusobacterium nucleatum
STGKGNIGI

SEQ ID NO: 4129 - protein, 9 aa, Fusobacterium nucleatum
KYYTYGIGV

SEQ ID NO: 4130 - protein, 10 aa, Fusobacterium nucleatum
ITVGKDGIAF

SEQ ID NO: 4131 - protein, 11 aa, Fusobacterium nucleatum
YGQITGVAMAK

SEQ ID NO: 4132 - protein, 9 aa, Fusobacterium nucleatum
NTKDININT

SEQ ID NO: 4133 - protein, 11 aa, Fusobacterium nucleatum
KSPWSSWQFGM

SEQ ID NO: 4134 - protein, 10 aa, Fusobacterium nucleatum
VRGGVGLRVI

SEQ ID NO: 4135 - protein, 10 aa, Fusobacterium nucleatum
LNETTGTITV

SEQ ID NO: 4136 - protein, 11 aa, Fusobacterium nucleatum
SKYYTYGIGIK

SEQ ID NO: 4137 - protein, 11 aa, Fusobacterium nucleatum
FVKKTDNAWNF

SEQ ID NO: 4138 - protein, 9 aa, Fusobacterium nucleatum
NGNKNLKPR

SEQ ID NO: 4139 - protein, 10 aa, Fusobacterium nucleatum
HSMTWQEGNF

SEQ ID NO: 4140 - protein, 10 aa, Fusobacterium nucleatum
YGFYNKDTRK

SEQ ID NO: 4141 - protein, 9 aa, Fusobacterium nucleatum
GELDIDTHI

SEQ ID NO: 4142 - protein, 9 aa, Fusobacterium nucleatum
ENKEAVGIF

SEQ ID NO: 4143 - protein, 8 aa, Fusobacterium nucleatum
AAYSTGML

SEQ ID NO: 4144 - protein, 9 aa, Fusobacterium nucleatum
KSKYYTYGI

SEQ ID NO: 4145 - protein, 11 aa, Fusobacterium nucleatum
KEPTNEVEILA

SEQ ID NO: 4146 - protein, 11 aa, Fusobacterium nucleatum
DKATLDSNTSK

SEQ ID NO: 4147 - protein, 10 aa, Fusobacterium nucleatum
IKNDGEIRIY

SEQ ID NO: 4148 - protein, 10 aa, Fusobacterium nucleatum
FYIKNGGNFT

SEQ ID NO: 4149 - protein, 10 aa, Fusobacterium nucleatum
NLGTVNQNRV

SEQ ID NO: 4150 - protein, 9 aa, Fusobacterium nucleatum
GSSAVYVSK

SEQ ID NO: 4151 - protein, 10 aa, Fusobacterium nucleatum
KARGILGVNS

SEQ ID NO: 4152 - protein, 9 aa, Fusobacterium nucleatum
YSDVSKIVY

SEQ ID NO: 4153 - protein, 11 aa, Fusobacterium nucleatum
KFLVVDEIFHA

SEQ ID NO: 4154 - protein, 8 aa, Fusobacterium nucleatum
AEKSTAMF

SEQ ID NO: 4155 - protein, 10 aa, Fusobacterium nucleatum
YYVNGKDSAL

SEQ ID NO: 4156 - protein, 11 aa, Fusobacterium nucleatum
EVKENDYLSIR

SEQ ID NO: 4157 - protein, 9 aa, Fusobacterium nucleatum
MSAENSIGI

SEQ ID NO: 4158 - protein, 10 aa, Fusobacterium nucleatum
EIDEANGGTV

SEQ ID NO: 4159 - protein, 8 aa, Fusobacterium nucleatum
STSVGVAY

SEQ ID NO: 4160 - protein, 11 aa, Fusobacterium nucleatum
TAKGSANFSNK

SEQ ID NO: 4161 - protein, 9 aa, Fusobacterium nucleatum
LVANNGANV

SEQ ID NO: 4162 - protein, 9 aa, Fusobacterium nucleatum
TVNQNRVAY

SEQ ID NO: 4163 - protein, 9 aa, Fusobacterium nucleatum
GYIKNDGEI

SEQ ID NO: 4164 - protein, 8 aa, Fusobacterium nucleatum
KIKTFGMK

SEQ ID NO: 4165 - protein, 8 aa, Fusobacterium nucleatum
KVGTITLK

SEQ ID NO: 4166 - protein, 9 aa, Fusobacterium nucleatum
ITTPITAGK

SEQ ID NO: 4167 - protein, 10 aa, Fusobacterium nucleatum
GNIYVNTSDK

SEQ ID NO: 4168 - protein, 9 aa, Fusobacterium nucleatum
LSKDTSSIA

SEQ ID NO: 4169 - protein, 9 aa, Fusobacterium nucleatum
YTYGIGVKN

SEQ ID NO: 4170 - protein, 9 aa, Fusobacterium nucleatum
GSTLENHGK

SEQ ID NO: 4171 - protein, 9 aa, Fusobacterium nucleatum
KSIGIYSTT

SEQ ID NO: 4172 - protein, 11 aa, Fusobacterium nucleatum
VRGGVGLRVIF

SEQ ID NO: 4173 - protein, 10 aa, Fusobacterium nucleatum
SAGMLGSEGK

SEQ ID NO: 4174 - protein, 10 aa, Fusobacterium nucleatum
KATNKGRILV

SEQ ID NO: 4175 - protein, 10 aa, Fusobacterium nucleatum
VTGLAGVAVM

SEQ ID NO: 4176 - protein, 10 aa, Fusobacterium nucleatum
STLTGVKTIK

SEQ ID NO: 4177 - protein, 10 aa, Fusobacterium nucleatum
NIGIYAQGNY

SEQ ID NO: 4178 - protein, 8 aa, Fusobacterium nucleatum
EDFSIRPY

SEQ ID NO: 4179 - protein, 10 aa, Fusobacterium nucleatum
SISSVSKNVK

SEQ ID NO: 4180 - protein, 9 aa, Fusobacterium nucleatum
NTKDINVNT

SEQ ID NO: 4181 - protein, 9 aa, Fusobacterium nucleatum
GASLFYATL

SEQ ID NO: 4182 - protein, 9 aa, Fusobacterium nucleatum
GIYAPKANI

SEQ ID NO: 4183 - protein, 11 aa, Fusobacterium nucleatum
ITMTNEGSAAM

SEQ ID NO: 4184 - protein, 9 aa, Fusobacterium nucleatum
DEESAGMYV

SEQ ID NO: 4185 - protein, 8 aa, Fusobacterium nucleatum
GLSDIGFY

SEQ ID NO: 4186 - protein, 9 aa, Fusobacterium nucleatum
ITGVAMAKL

SEQ ID NO: 4187 - protein, 11 aa, Fusobacterium nucleatum
LERKFLVVDEI

SEQ ID NO: 4188 - protein, 8 aa, Fusobacterium nucleatum
TMQNKNAV

SEQ ID NO: 4189 - protein, 10 aa, Fusobacterium nucleatum
AENGVGIFVS

SEQ ID NO: 4190 - protein, 9 aa, Fusobacterium nucleatum
MLAQNNGKV

SEQ ID NO: 4191 - protein, 11 aa, Fusobacterium nucleatum
LMAEGIKNHGM

SEQ ID NO: 4192 - protein, 10 aa, Fusobacterium nucleatum
LGLAILFLML

SEQ ID NO: 4193 - protein, 10 aa, Fusobacterium nucleatum
NTGNITVGDK

SEQ ID NO: 4194 - protein, 9 aa, Fusobacterium nucleatum
STATNKGTI

SEQ ID NO: 4195 - protein, 10 aa, Fusobacterium nucleatum
SVPFDDNNSL

SEQ ID NO: 4196 - protein, 9 aa, Fusobacterium nucleatum
NANKNLKPK

SEQ ID NO: 4197 - protein, 11 aa, Fusobacterium nucleatum
GVYLQGTSGDK

SEQ ID NO: 4198 - protein, 11 aa, Fusobacterium nucleatum
IYAPKSNISKV

SEQ ID NO: 4199 - protein, 8 aa, Fusobacterium nucleatum
VEQIGKLI

SEQ ID NO: 4200 - protein, 10 aa, Fusobacterium nucleatum
GEGASLFYAT

SEQ ID NO: 4201 - protein, 8 aa, Fusobacterium nucleatum
YVDDGATF

SEQ ID NO: 4202 - protein, 10 aa, Fusobacterium nucleatum
ETTGTITVSE

SEQ ID NO: 4203 - protein, 11 aa, Fusobacterium nucleatum
MTWQEGNFEAV

SEQ ID NO: 4204 - protein, 11 aa, Fusobacterium nucleatum
LLNDTNGNITV

SEQ ID NO: 4205 - protein, 10 aa, Fusobacterium nucleatum
LPGGEIGRSA

SEQ ID NO: 4206 - protein, 11 aa, Fusobacterium nucleatum
GRGTGWYTGIV

SEQ ID NO: 4207 - protein, 9 aa, Fusobacterium nucleatum
KDQGVGIYK

SEQ ID NO: 4208 - protein, 9 aa, Fusobacterium nucleatum
NSIGIMGEK

SEQ ID NO: 4209 - protein, 9 aa, Fusobacterium nucleatum
TMLYLKNSI

SEQ ID NO: 4210 - protein, 9 aa, Fusobacterium nucleatum
VTGLAGVAV

SEQ ID NO: 4211 - protein, 11 aa, Fusobacterium nucleatum
STFGLLNGNKN

SEQ ID NO: 4212 - protein, 10 aa, Fusobacterium nucleatum
DVNPQVNEPL

SEQ ID NO: 4213 - protein, 10 aa, Fusobacterium nucleatum
KGTKGVVAIA

SEQ ID NO: 4214 - protein, 9 aa, Fusobacterium nucleatum
VAATSPSDK

SEQ ID NO: 4215 - protein, 10 aa, Fusobacterium nucleatum
AGLIAINGTV

SEQ ID NO: 4216 - protein, 10 aa, Fusobacterium nucleatum
KSKYYTYGIG

SEQ ID NO: 4217 - protein, 10 aa, Fusobacterium nucleatum
VAIASEGTTF

SEQ ID NO: 4218 - protein, 10 aa, Fusobacterium nucleatum
TLENHGKIYI

SEQ ID NO: 4219 - protein, 10 aa, Fusobacterium nucleatum
GISWKDVTPA

SEQ ID NO: 4220 - protein, 9 aa, Fusobacterium nucleatum
ALTGVKTIK

SEQ ID NO: 4221 - protein, 9 aa, Fusobacterium nucleatum
YKESGKLTI

SEQ ID NO: 4222 - protein, 9 aa, Fusobacterium nucleatum
KVTLGTNTI

SEQ ID NO: 4223 - protein, 9 aa, Fusobacterium nucleatum
LENTGDINI

SEQ ID NO: 4224 - protein, 10 aa, Fusobacterium nucleatum
KILIDADNSY

SEQ ID NO: 4225 - protein, 9 aa, Fusobacterium nucleatum
VGMYSSSSL

SEQ ID NO: 4226 - protein, 9 aa, Fusobacterium nucleatum
RAKNDGTIK

SEQ ID NO: 4227 - protein, 9 aa, Fusobacterium nucleatum
AKAILDEDY

SEQ ID NO: 4228 - protein, 9 aa, Fusobacterium nucleatum
ESAVINSGR

SEQ ID NO: 4229 - protein, 10 aa, Fusobacterium nucleatum
SSDGLVGISV

SEQ ID NO: 4230 - protein, 10 aa, Fusobacterium nucleatum
NADASRNTTM

SEQ ID NO: 4231 - protein, 8 aa, Fusobacterium nucleatum
TTVNVTAL

SEQ ID NO: 4232 - protein, 9 aa, Fusobacterium nucleatum
IVHNRFKFK

SEQ ID NO: 4233 - protein, 10 aa, Fusobacterium nucleatum
TNTDAGTVSL

SEQ ID NO: 4234 - protein, 11 aa, Fusobacterium nucleatum
TINQKKSVGIY

SEQ ID NO: 4235 - protein, 9 aa, Fusobacterium nucleatum
MYSSSSLKA

SEQ ID NO: 4236 - protein, 9 aa, Fusobacterium nucleatum
FYVDTLGRT

SEQ ID NO: 4237 - protein, 10 aa, Fusobacterium nucleatum
YIDADNSYGV

SEQ ID NO: 4238 - protein, 10 aa, Fusobacterium nucleatum
KLGKGTGWYT

SEQ ID NO: 4239 - protein, 10 aa, Fusobacterium nucleatum
KVYTDVSKIV

SEQ ID NO: 4240 - protein, 9 aa, Fusobacterium nucleatum
KLPYTSFVK

SEQ ID NO: 4241 - protein, 10 aa, Fusobacterium nucleatum
GVLAYLENSK

SEQ ID NO: 4242 - protein, 9 aa, Fusobacterium nucleatum
KEESSVGIY

SEQ ID NO: 4243 - protein, 10 aa, Fusobacterium nucleatum
TMTTATNIAL

SEQ ID NO: 4244 - protein, 9 aa, Fusobacterium nucleatum
NGKAIINNK

SEQ ID NO: 4245 - protein, 10 aa, Fusobacterium nucleatum
GVYGKKGSDV

SEQ ID NO: 4246 - protein, 9 aa, Fusobacterium nucleatum
SDGLVGISV

SEQ ID NO: 4247 - protein, 10 aa, Fusobacterium nucleatum
NNSNHLIAFY

SEQ ID NO: 4248 - protein, 11 aa, Fusobacterium nucleatum
NAMDVAENQRV

SEQ ID NO: 4249 - protein, 10 aa, Fusobacterium nucleatum
TMTTAANIAL

SEQ ID NO: 4250 - protein, 9 aa, Fusobacterium nucleatum
GSNLKNTGK

SEQ ID NO: 4251 - protein, 9 aa, Fusobacterium nucleatum
VTLGSNTIK

SEQ ID NO: 4252 - protein, 9 aa, Fusobacterium nucleatum
KGHNVRGGV

SEQ ID NO: 4253 - protein, 10 aa, Fusobacterium nucleatum
NKLERKFLVV

SEQ ID NO: 4254 - protein, 9 aa, Fusobacterium nucleatum
GTGIFITKK

SEQ ID NO: 4255 - protein, 9 aa, Fusobacterium nucleatum
NIQGVGVYA

SEQ ID NO: 4256 - protein, 9 aa, Fusobacterium nucleatum
GDAASTSVL

SEQ ID NO: 4257 - protein, 8 aa, Fusobacterium nucleatum
YRHYFGTK

SEQ ID NO: 4258 - protein, 10 aa, Fusobacterium nucleatum
ETSIATGKTV

SEQ ID NO: 4259 - protein, 9 aa, Fusobacterium nucleatum
IQSMTGVYV

SEQ ID NO: 4260 - protein, 9 aa, Fusobacterium nucleatum
KFGTGSKLK

SEQ ID NO: 4261 - protein, 10 aa, Fusobacterium nucleatum
INSQESAGIY

SEQ ID NO: 4262 - protein, 8 aa, Fusobacterium nucleatum
KVRNAMDV

SEQ ID NO: 4263 - protein, 9 aa, Fusobacterium nucleatum
GTAGTPYNI

SEQ ID NO: 4264 - protein, 10 aa, Fusobacterium nucleatum
IYAKNDASNI

SEQ ID NO: 4265 - protein, 9 aa, Fusobacterium nucleatum
TLISTRIDK

SEQ ID NO: 4266 - protein, 10 aa, Fusobacterium nucleatum
RIVATSIGKR

SEQ ID NO: 4267 - protein, 9 aa, Fusobacterium nucleatum
NPDPNKLEL

SEQ ID NO: 4268 - protein, 11 aa, Fusobacterium nucleatum
DEIFHAKSKYY

SEQ ID NO: 4269 - protein, 9 aa, Fusobacterium nucleatum
STVSNGSSA

SEQ ID NO: 4270 - protein, 9 aa, Fusobacterium nucleatum
EFSHLRNSW

SEQ ID NO: 4271 - protein, 10 aa, Fusobacterium nucleatum
SANFSNKGVL

SEQ ID NO: 4272 - protein, 9 aa, Fusobacterium nucleatum
NTSKLDYTA

SEQ ID NO: 4273 - protein, 10 aa, Fusobacterium nucleatum
KATNKGRVYV

SEQ ID NO: 4274 - protein, 10 aa, Fusobacterium nucleatum
KNIITLNGKK

SEQ ID NO: 4275 - protein, 10 aa, Fusobacterium nucleatum
KYYTYGIGIK

SEQ ID NO: 4276 - protein, 10 aa, Fusobacterium nucleatum
MSGSPSVAMY

SEQ ID NO: 4277 - protein, 9 aa, Fusobacterium nucleatum
TAKLSLTNK

SEQ ID NO: 4278 - protein, 9 aa, Fusobacterium nucleatum
KGRGDKAQK

SEQ ID NO: 4279 - protein, 9 aa, Fusobacterium nucleatum
SSATNKKTI

SEQ ID NO: 4280 - protein, 9 aa, Fusobacterium nucleatum
KSLVTNNSA

SEQ ID NO: 4281 - protein, 11 aa, Fusobacterium nucleatum
ARGILATNSNL

SEQ ID NO: 4282 - protein, 9 aa, Fusobacterium nucleatum
GTIDFSTGK

SEQ ID NO: 4283 - protein, 10 aa, Fusobacterium nucleatum
VHINGNKNLK

SEQ ID NO: 4284 - protein, 11 aa, Fusobacterium nucleatum
ASTAKLSLTNK

SEQ ID NO: 4285 - protein, 11 aa, Fusobacterium nucleatum
ILFLMLGVGAF

SEQ ID NO: 4286 - protein, 9 aa, Fusobacterium nucleatum
VGEKSIGIY

SEQ ID NO: 4287 - protein, 10 aa, Fusobacterium nucleatum
STVNIDHWTF

SEQ ID NO: 4288 - protein, 9 aa, Fusobacterium nucleatum
SWTGIPTTV

SEQ ID NO: 4289 - protein, 9 aa, Fusobacterium nucleatum
ATNEDTINV

SEQ ID NO: 4290 - protein, 11 aa, Fusobacterium nucleatum
ILIDADNSYGV

SEQ ID NO: 4291 - protein, 8 aa, Fusobacterium nucleatum
DTINVNGK

SEQ ID NO: 4292 - protein, 9 aa, Fusobacterium nucleatum
LTMTTATNI

SEQ ID NO: 4293 - protein, 9 aa, Fusobacterium nucleatum
GTIDLNSGA

SEQ ID NO: 4294 - protein, 11 aa, Fusobacterium nucleatum
KVKTFGMKGEY

SEQ ID NO: 4295 - protein, 11 aa, Fusobacterium nucleatum
ENIGLMAEGIK

SEQ ID NO: 4296 - protein, 9 aa, Fusobacterium nucleatum
YAPKANISK

SEQ ID NO: 4297 - protein, 10 aa, Fusobacterium nucleatum
KESAGVYAPK

SEQ ID NO: 4298 - protein, 9 aa, Fusobacterium nucleatum
AEKSTAMFI

SEQ ID NO: 4299 - protein, 9 aa, Fusobacterium nucleatum
VYVSNGGKV

SEQ ID NO: 4300 - protein, 10 aa, Fusobacterium nucleatum
LAYKHYFGTK

SEQ ID NO: 4301 - protein, 10 aa, Fusobacterium nucleatum
FGFNNADASR

SEQ ID NO: 4302 - protein, 10 aa, Fusobacterium nucleatum
HYFGTKTLRT

SEQ ID NO: 4303 - protein, 10 aa, Fusobacterium nucleatum
GIYSTTNSNV

SEQ ID NO: 4304 - protein, 11 aa, Fusobacterium nucleatum
LIQLMEQGNQV

SEQ ID NO: 4305 - protein, 11 aa, Fusobacterium nucleatum
SANSLEPTIGI

SEQ ID NO: 4306 - protein, 10 aa, Fusobacterium nucleatum
LGSTQNTMLY

SEQ ID NO: 4307 - protein, 11 aa, Fusobacterium nucleatum
YVDDGAKFINR

SEQ ID NO: 4308 - protein, 10 aa, Fusobacterium nucleatum
KAESGIGMLA

SEQ ID NO: 4309 - protein, 11 aa, Fusobacterium nucleatum
ELAYKHYFGTK

SEQ ID NO: 4310 - protein, 11 aa, Fusobacterium nucleatum
SGATKNVGIYA

SEQ ID NO: 4311 - protein, 11 aa, Fusobacterium nucleatum
AGKATTVTNKK

SEQ ID NO: 4312 - protein, 10 aa, Fusobacterium nucleatum
LKPKMVLTHV

SEQ ID NO: 4313 - protein, 10 aa, Fusobacterium nucleatum
FIGHNKLERK

SEQ ID NO: 4314 - protein, 10 aa, Fusobacterium nucleatum
NPLTINAPDA

SEQ ID NO: 4315 - protein, 10 aa, Fusobacterium nucleatum
VAQKASAGIY

SEQ ID NO: 4316 - protein, 8 aa, Fusobacterium nucleatum
KESIGIYA

SEQ ID NO: 4317 - protein, 8 aa, Fusobacterium nucleatum
GEDNSTLL

SEQ ID NO: 4318 - protein, 11 aa, Fusobacterium nucleatum
YNKMHRKFLVV

SEQ ID NO: 4319 - protein, 9 aa, Fusobacterium nucleatum
ILGSKGSNL

SEQ ID NO: 4320 - protein, 10 aa, Fusobacterium nucleatum
GANVEIASGK

SEQ ID NO: 4321 - protein, 9 aa, Fusobacterium nucleatum
LGLSDIGFY

SEQ ID NO: 4322 - protein, 10 aa, Fusobacterium nucleatum
SNTIKLKGTK

SEQ ID NO: 4323 - protein, 10 aa, Fusobacterium nucleatum
ISSDPEGQAL

SEQ ID NO: 4324 - protein, 10 aa, Fusobacterium nucleatum
HVKDQGVGIY

SEQ ID NO: 4325 - protein, 10 aa, Fusobacterium nucleatum
IVSFGEGASL

SEQ ID NO: 4326 - protein, 9 aa, Fusobacterium nucleatum
KNKAKVAYT

SEQ ID NO: 4327 - protein, 8 aa, Fusobacterium nucleatum
NEGEIRIY

SEQ ID NO: 4328 - protein, 9 aa, Fusobacterium nucleatum
LKATNKGTI

SEQ ID NO: 4329 - protein, 10 aa, Fusobacterium nucleatum
TTVENTGKIY

SEQ ID NO: 4330 - protein, 10 aa, Fusobacterium nucleatum
DGKSAGIYSK

SEQ ID NO: 4331 - protein, 8 aa, Fusobacterium nucleatum
AMFINSAR

SEQ ID NO: 4332 - protein, 9 aa, Fusobacterium nucleatum
NSKESAGVY

SEQ ID NO: 4333 - protein, 11 aa, Fusobacterium nucleatum
KLKGTKGVVAI

SEQ ID NO: 4334 - protein, 10 aa, Fusobacterium nucleatum
KNSIGIYGFY

SEQ ID NO: 4335 - protein, 10 aa, Fusobacterium nucleatum
ELAYRHYFGI

SEQ ID NO: 4336 - protein, 9 aa, Fusobacterium nucleatum
LKRSGDITA

SEQ ID NO: 4337 - protein, 11 aa, Fusobacterium nucleatum
NEGSAGVLAEK

SEQ ID NO: 4338 - protein, 11 aa, Fusobacterium nucleatum
EEQLQAKVGLF

SEQ ID NO: 4339 - protein, 10 aa, Fusobacterium nucleatum
QVVKSPWSSW

SEQ ID NO: 4340 - protein, 9 aa, Fusobacterium nucleatum
ASGNISTAL

SEQ ID NO: 4341 - protein, 9 aa, Fusobacterium nucleatum
LGLAILFLM

SEQ ID NO: 4342 - protein, 9 aa, Fusobacterium nucleatum
TALTNRDYI

SEQ ID NO: 4343 - protein, 10 aa, Fusobacterium nucleatum
SALAGADIGK

SEQ ID NO: 4344 - protein, 9 aa, Fusobacterium nucleatum
NTNTGTVTM

SEQ ID NO: 4345 - protein, 9 aa, Fusobacterium nucleatum
NKNLTMTTA

SEQ ID NO: 4346 - protein, 11 aa, Fusobacterium nucleatum
HGTIDFSAAEK

SEQ ID NO: 4347 - protein, 11 aa, Fusobacterium nucleatum
GLSDIGFYVDT

SEQ ID NO: 4348 - protein, 10 aa, Fusobacterium nucleatum
GRGDKPQKYL

SEQ ID NO: 4349 - protein, 8 aa, Fusobacterium nucleatum
YIDADNSY

SEQ ID NO: 4350 - protein, 9 aa, Fusobacterium nucleatum
FVSETGVGE

SEQ ID NO: 4351 - protein, 8 aa, Fusobacterium nucleatum
KARGILGV

SEQ ID NO: 4352 - protein, 9 aa, Fusobacterium nucleatum
SKKEGGAKL

SEQ ID NO: 4353 - protein, 10 aa, Fusobacterium nucleatum
SPSDKAKYAI

SEQ ID NO: 4354 - protein, 9 aa, Fusobacterium nucleatum
AYKHYFGAK

SEQ ID NO: 4355 - protein, 11 aa, Fusobacterium nucleatum
KNLRLELIQLM

SEQ ID NO: 4356 - protein, 8 aa, Fusobacterium nucleatum
PYNITTPI

SEQ ID NO: 4357 - protein, 10 aa, Fusobacterium nucleatum
SKYYTYGIGI

SEQ ID NO: 4358 - protein, 9 aa, Fusobacterium nucleatum
VAYTNADWF

SEQ ID NO: 4359 - protein, 10 aa, Fusobacterium nucleatum
GFYNKDTRKY

SEQ ID NO: 4360 - protein, 10 aa, Fusobacterium nucleatum
VTNSPLLSKY

SEQ ID NO: 4361 - protein, 11 aa, Fusobacterium nucleatum
TTDSYAGRDGK

SEQ ID NO: 4362 - protein, 11 aa, Fusobacterium nucleatum
SWQFGMNYFYE

SEQ ID NO: 4363 - protein, 10 aa, Fusobacterium nucleatum
YLQGASGDKA

SEQ ID NO: 4364 - protein, 10 aa, Fusobacterium nucleatum
ITVKNGKPTF

SEQ ID NO: 4365 - protein, 10 aa, Fusobacterium nucleatum
NDYLSIRPEI

SEQ ID NO: 4366 - protein, 10 aa, Fusobacterium nucleatum
IQSYIKGIKV

SEQ ID NO: 4367 - protein, 9 aa, Fusobacterium nucleatum
LENSKFVSH

SEQ ID NO: 4368 - protein, 8 aa, Fusobacterium nucleatum
GETDIQSY

SEQ ID NO: 4369 - protein, 9 aa, Fusobacterium nucleatum
NAESITGTK

SEQ ID NO: 4370 - protein, 9 aa, Fusobacterium nucleatum
GTGNGIIGL

SEQ ID NO: 4371 - protein, 11 aa, Fusobacterium nucleatum
SFEPAIGIYTA

SEQ ID NO: 4372 - protein, 9 aa, Fusobacterium nucleatum
AVSSAGVYA

SEQ ID NO: 4373 - protein, 10 aa, Fusobacterium nucleatum
YVNGKDSALA

SEQ ID NO: 4374 - protein, 11 aa, Fusobacterium nucleatum
STAKLSLTNKK

SEQ ID NO: 4375 - protein, 10 aa, Fusobacterium nucleatum
GMYVKNGTSK

SEQ ID NO: 4376 - protein, 11 aa, Fusobacterium nucleatum
YTYGIGVKNEI

SEQ ID NO: 4377 - protein, 11 aa, Fusobacterium nucleatum
NTVPRSNPSDK

SEQ ID NO: 4378 - protein, 10 aa, Fusobacterium nucleatum
DIQSYIKGIK

SEQ ID NO: 4379 - protein, 10 aa, Fusobacterium nucleatum
SLENKESVGI

SEQ ID NO: 4380 - protein, 9 aa, Fusobacterium nucleatum
GSAGIYSII

SEQ ID NO: 4381 - protein, 10 aa, Fusobacterium nucleatum
GTNASNKINF

SEQ ID NO: 4382 - protein, 10 aa, Fusobacterium nucleatum
RVYINANKNL

SEQ ID NO: 4383 - protein, 11 aa, Fusobacterium nucleatum
WTISGDMFVGY

SEQ ID NO: 4384 - protein, 11 aa, Fusobacterium nucleatum
EVEKIGKLIGK

SEQ ID NO: 4385 - protein, 9 aa, Fusobacterium nucleatum
YTAEGSSNI

SEQ ID NO: 4386 - protein, 11 aa, Fusobacterium nucleatum
ITSFGEGASIF

SEQ ID NO: 4387 - protein, 11 aa, Fusobacterium nucleatum
KTFGMKGEYKT

SEQ ID NO: 4388 - protein, 9 aa, Fusobacterium nucleatum
FLMLGVSAF

SEQ ID NO: 4389 - protein, 8 aa, Fusobacterium nucleatum
DTAGVIDY

SEQ ID NO: 4390 - protein, 10 aa, Fusobacterium nucleatum
FRLSEGFSIR

SEQ ID NO: 4391 - protein, 9 aa, Fusobacterium nucleatum
ASIFYATLK

SEQ ID NO: 4392 - protein, 10 aa, Fusobacterium nucleatum
YAVIKNYGEI

SEQ ID NO: 4393 - protein, 9 aa, Fusobacterium nucleatum
GLYSKGQSY

SEQ ID NO: 4394 - protein, 10 aa, Fusobacterium nucleatum
MLAKDTNSTA

SEQ ID NO: 4395 - protein, 9 aa, Fusobacterium nucleatum
SANFSNKGV

SEQ ID NO: 4396 - protein, 8 aa, Fusobacterium nucleatum
AADNGGYI

SEQ ID NO: 4397 - protein, 9 aa, Fusobacterium nucleatum
ALKGLRLEL

SEQ ID NO: 4398 - protein, 10 aa, Fusobacterium nucleatum
HQYANVQQRV

SEQ ID NO: 4399 - protein, 10 aa, Fusobacterium nucleatum
SQAYIDELQK

SEQ ID NO: 4400 - protein, 9 aa, Fusobacterium nucleatum
NIYVNTSDK

SEQ ID NO: 4401 - protein, 10 aa, Fusobacterium nucleatum
ILFLMLGVSA

SEQ ID NO: 4402 - protein, 10 aa, Fusobacterium nucleatum
TGEVNIKAPI

SEQ ID NO: 4403 - protein, 10 aa, Fusobacterium nucleatum
SSHEDLRSER

SEQ ID NO: 4404 - protein, 9 aa, Fusobacterium nucleatum
MYVENSSAT

SEQ ID NO: 4405 - protein, 11 aa, Fusobacterium nucleatum
GEGASIFYATL

SEQ ID NO: 4406 - protein, 10 aa, Fusobacterium nucleatum
VQATGIVLDK

SEQ ID NO: 4407 - protein, 8 aa, Fusobacterium nucleatum
ETSIATGK

SEQ ID NO: 4408 - protein, 10 aa, Fusobacterium nucleatum
TSAGMLGKVK

SEQ ID NO: 4409 - protein, 11 aa, Fusobacterium nucleatum
GIYAVNGQDTK

SEQ ID NO: 4410 - protein, 10 aa, Fusobacterium nucleatum
NNTFKIESGK

SEQ ID NO: 4411 - protein, 9 aa, Fusobacterium nucleatum
VANGKNKAR

SEQ ID NO: 4412 - protein, 11 aa, Fusobacterium nucleatum
DFSIRPYGALK

SEQ ID NO: 4413 - protein, 10 aa, Fusobacterium nucleatum
AGTGIFITKK

SEQ ID NO: 4414 - protein, 8 aa, Fusobacterium nucleatum
AVMNGSTL

SEQ ID NO: 4415 - protein, 10 aa, Fusobacterium nucleatum
SHESLIGMFA

SEQ ID NO: 4416 - protein, 10 aa, Fusobacterium nucleatum
LGMSDIGFYV

SEQ ID NO: 4417 - protein, 9 aa, Fusobacterium nucleatum
YLKNSIAQL

SEQ ID NO: 4418 - protein, 9 aa, Fusobacterium nucleatum
GTKAVTQET

SEQ ID NO: 4419 - protein, 9 aa, Fusobacterium nucleatum
LAYLENSKF

SEQ ID NO: 4420 - protein, 10 aa, Fusobacterium nucleatum
GNGSVGLYSK

SEQ ID NO: 4421 - protein, 10 aa, Fusobacterium nucleatum
GTTSEIIVNK

SEQ ID NO: 4422 - protein, 11 aa, Fusobacterium nucleatum
QALRAATGTNK

SEQ ID NO: 4423 - protein, 10 aa, Fusobacterium nucleatum
MSAENSIGIM

SEQ ID NO: 4424 - protein, 10 aa, Fusobacterium nucleatum
DITAKGSANF

SEQ ID NO: 4425 - protein, 11 aa, Fusobacterium nucleatum
IFVGYNKMHRK

SEQ ID NO: 4426 - protein, 9 aa, Fusobacterium nucleatum
YGKGIGTTV

SEQ ID NO: 4427 - protein, 9 aa, Fusobacterium nucleatum
NTSDKINIV

SEQ ID NO: 4428 - protein, 11 aa, Fusobacterium nucleatum
RYAVIKNYGEI

SEQ ID NO: 4429 - protein, 8 aa, Fusobacterium nucleatum
AKLPYTSF

SEQ ID NO: 4430 - protein, 9 aa, Fusobacterium nucleatum
VYSDVSKIV

SEQ ID NO: 4431 - protein, 10 aa, Fusobacterium nucleatum
IVTGKTVTSV

SEQ ID NO: 4432 - protein, 9 aa, Fusobacterium nucleatum
KATNKGRVY

SEQ ID NO: 4433 - protein, 11 aa, Fusobacterium nucleatum
AWNFADGLEQR

SEQ ID NO: 4434 - protein, 10 aa, Fusobacterium nucleatum
DSNGSSAVYV

SEQ ID NO: 4435 - protein, 11 aa, Fusobacterium nucleatum
GVYVDDGATFK

SEQ ID NO: 4436 - protein, 10 aa, Fusobacterium nucleatum
GLYSKGQSYT

SEQ ID NO: 4437 - protein, 9 aa, Fusobacterium nucleatum
ANVEIASGK

SEQ ID NO: 4438 - protein, 10 aa, Fusobacterium nucleatum
NLKAESGIGM

SEQ ID NO: 4439 - protein, 10 aa, Fusobacterium nucleatum
LSAKKSTGIF

SEQ ID NO: 4440 - protein, 10 aa, Fusobacterium nucleatum
TTTDSYAGRD

SEQ ID NO: 4441 - protein, 9 aa, Fusobacterium nucleatum
KTISVTAEK

SEQ ID NO: 4442 - protein, 9 aa, Fusobacterium nucleatum
IALEKKESV

SEQ ID NO: 4443 - protein, 10 aa, Fusobacterium nucleatum
NQNSIVVNTK

SEQ ID NO: 4444 - protein, 9 aa, Fusobacterium nucleatum
INSSSIANK

SEQ ID NO: 4445 - protein, 11 aa, Fusobacterium nucleatum
YVDDGATFKNY

SEQ ID NO: 4446 - protein, 9 aa, Fusobacterium nucleatum
TFGMKGEYK

SEQ ID NO: 4447 - protein, 10 aa, Fusobacterium nucleatum
WTFNNNGNSA

SEQ ID NO: 4448 - protein, 10 aa, Fusobacterium nucleatum
ILDKEFTHLR

SEQ ID NO: 4449 - protein, 10 aa, Fusobacterium nucleatum
AMYAENTNLT

SEQ ID NO: 4450 - protein, 9 aa, Fusobacterium nucleatum
GVGTTVENK

SEQ ID NO: 4451 - protein, 11 aa, Fusobacterium nucleatum
RGKGTWGISWK

SEQ ID NO: 4452 - protein, 11 aa, Fusobacterium nucleatum
KSAVTASTAKL

SEQ ID NO: 4453 - protein, 8 aa, Fusobacterium nucleatum
SLFYATSK

SEQ ID NO: 4454 - protein, 11 aa, Fusobacterium nucleatum
VAYENELGRVA

SEQ ID NO: 4455 - protein, 9 aa, Fusobacterium nucleatum
ITGSPSVAM

SEQ ID NO: 4456 - protein, 9 aa, Fusobacterium nucleatum
LEVKENDYL

SEQ ID NO: 4457 - protein, 9 aa, Fusobacterium nucleatum
TELAYKHYF

SEQ ID NO: 4458 - protein, 10 aa, Fusobacterium nucleatum
YNAYGVAYVH

SEQ ID NO: 4459 - protein, 10 aa, Fusobacterium nucleatum
GILVTNESAV

SEQ ID NO: 4460 - protein, 10 aa, Fusobacterium nucleatum
KSGEVKLEVK

SEQ ID NO: 4461 - protein, 9 aa, Fusobacterium nucleatum
FLRNGVPIS

SEQ ID NO: 4462 - protein, 9 aa, Fusobacterium nucleatum
SRENLRNSV

SEQ ID NO: 4463 - protein, 8 aa, Fusobacterium nucleatum
TEPTVQTL

SEQ ID NO: 4464 - protein, 11 aa, Fusobacterium nucleatum
VLDGTNASNKI

SEQ ID NO: 4465 - protein, 11 aa, Fusobacterium nucleatum
YTNTDAGTVSL

SEQ ID NO: 4466 - protein, 9 aa, Fusobacterium nucleatum
SIFYATLKA

SEQ ID NO: 4467 - protein, 11 aa, Fusobacterium nucleatum
TLDSNTSKLDY

SEQ ID NO: 4468 - protein, 11 aa, Fusobacterium nucleatum
ARIVATSIGKR

SEQ ID NO: 4469 - protein, 10 aa, Fusobacterium nucleatum
HYFGIKTLRT

SEQ ID NO: 4470 - protein, 8 aa, Fusobacterium nucleatum
YAVNGAQV

SEQ ID NO: 4471 - protein, 9 aa, Fusobacterium nucleatum
LVGSNIQGV

SEQ ID NO: 4472 - protein, 10 aa, Fusobacterium nucleatum
DSVFLYSNGK

SEQ ID NO: 4473 - protein, 9 aa, Fusobacterium nucleatum
EEALLTQAY

SEQ ID NO: 4474 - protein, 8 aa, Fusobacterium nucleatum
SAPSAPTI

SEQ ID NO: 4475 - protein, 9 aa, Fusobacterium nucleatum
RLSEGFSIR

SEQ ID NO: 4476 - protein, 10 aa, Fusobacterium nucleatum
MAADNGGYIK

SEQ ID NO: 4477 - protein, 10 aa, Fusobacterium nucleatum
IQLMEQGDQV

SEQ ID NO: 4478 - protein, 8 aa, Fusobacterium nucleatum
KEASVGIY

SEQ ID NO: 4479 - protein, 10 aa, Fusobacterium nucleatum
NSLEPTIGIY

SEQ ID NO: 4480 - protein, 9 aa, Fusobacterium nucleatum
HNRFKFKDI

SEQ ID NO: 4481 - protein, 11 aa, Fusobacterium nucleatum
SAVINSGRISL

SEQ ID NO: 4482 - protein, 10 aa, Fusobacterium nucleatum
NIDILAENGV

SEQ ID NO: 4483 - protein, 9 aa, Fusobacterium nucleatum
ETSAGMLGK

SEQ ID NO: 4484 - protein, 9 aa, Fusobacterium nucleatum
AYRHYFGTK

SEQ ID NO: 4485 - protein, 9 aa, Fusobacterium nucleatum
KQINSKISS

SEQ ID NO: 4486 - protein, 9 aa, Fusobacterium nucleatum
VKHNDYLSI

SEQ ID NO: 4487 - protein, 11 aa, Fusobacterium nucleatum
FIKDEKSVGIY

SEQ ID NO: 4488 - protein, 9 aa, Fusobacterium nucleatum
DTAGVIDYK

SEQ ID NO: 4489 - protein, 9 aa, Fusobacterium nucleatum
NTVTNSPLL

SEQ ID NO: 4490 - protein, 11 aa, Fusobacterium nucleatum
DVAENQRVGGR

SEQ ID NO: 4491 - protein, 9 aa, Fusobacterium nucleatum
TINAPSAPT

SEQ ID NO: 4492 - protein, 11 aa, Fusobacterium nucleatum
IFIGHNKLERK

SEQ ID NO: 4493 - protein, 9 aa, Fusobacterium nucleatum
ESAGVYAPK

SEQ ID NO: 4494 - protein, 10 aa, Fusobacterium nucleatum
YKVEKDLRSI

SEQ ID NO: 4495 - protein, 10 aa, Fusobacterium nucleatum
NWTISGDIFI

SEQ ID NO: 4496 - protein, 10 aa, Fusobacterium nucleatum
NKEYIVGMAG

SEQ ID NO: 4497 - protein, 10 aa, Fusobacterium nucleatum
NTKETVGMMI

SEQ ID NO: 4498 - protein, 11 aa, Fusobacterium nucleatum
KVRGKGTWGIS

SEQ ID NO: 4499 - protein, 9 aa, Fusobacterium nucleatum
SKINSSSIA

SEQ ID NO: 4500 - protein, 11 aa, Fusobacterium nucleatum
TTAGTGIFITK

SEQ ID NO: 4501 - protein, 10 aa, Fusobacterium nucleatum
IAGKKTLGVF

SEQ ID NO: 4502 - protein, 10 aa, Fusobacterium nucleatum
KSAVTASTAK

SEQ ID NO: 4503 - protein, 9 aa, Fusobacterium nucleatum
KATTVTNKK

SEQ ID NO: 4504 - protein, 10 aa, Fusobacterium nucleatum
NSSNGTTIGI

SEQ ID NO: 4505 - protein, 9 aa, Fusobacterium nucleatum
RSENEKALK

SEQ ID NO: 4506 - protein, 11 aa, Fusobacterium nucleatum
KVEYGRVSKIR

SEQ ID NO: 4507 - protein, 9 aa, Fusobacterium nucleatum
LENHGKIYI

SEQ ID NO: 4508 - protein, 10 aa, Fusobacterium nucleatum
LAILFLMLGV

SEQ ID NO: 4509 - protein, 9 aa, Fusobacterium nucleatum
TQNTMLYLK

SEQ ID NO: 4510 - protein, 9 aa, Fusobacterium nucleatum
YGFYNKDTR

SEQ ID NO: 4511 - protein, 9 aa, Fusobacterium nucleatum
GAYIEGNSI

SEQ ID NO: 4512 - protein, 11 aa, Fusobacterium nucleatum
SVGMYATNANV

SEQ ID NO: 4513 - protein, 11 aa, Fusobacterium nucleatum
RNAMDVAENQR

SEQ ID NO: 4514 - protein, 10 aa, Fusobacterium nucleatum
IFGKNSSTLL

SEQ ID NO: 4515 - protein, 11 aa, Fusobacterium nucleatum
STGMYLINAEK

SEQ ID NO: 4516 - protein, 10 aa, Fusobacterium nucleatum
NLINNSKISL

SEQ ID NO: 4517 - protein, 9 aa, Fusobacterium nucleatum
ITVKEESSV

SEQ ID NO: 4518 - protein, 10 aa, Fusobacterium nucleatum
SDIGFYVDTL

SEQ ID NO: 4519 - protein, 9 aa, Fusobacterium nucleatum
KLKGTKGVV

SEQ ID NO: 4520 - protein, 9 aa, Fusobacterium nucleatum
PWSSWQFGM

SEQ ID NO: 4521 - protein, 9 aa, Fusobacterium nucleatum
NSIGIYGFY

SEQ ID NO: 4522 - protein, 9 aa, Fusobacterium nucleatum
KDVQGVGVY

SEQ ID NO: 4523 - protein, 9 aa, Fusobacterium nucleatum
RVANGKNKA

SEQ ID NO: 4524 - protein, 10 aa, Fusobacterium nucleatum
AQGTAGTPYN

SEQ ID NO: 4525 - protein, 10 aa, Fusobacterium nucleatum
KKSAGVYVKL

SEQ ID NO: 4526 - protein, 10 aa, Fusobacterium nucleatum
DRRGNVKFDL

SEQ ID NO: 4527 - protein, 8 aa, Fusobacterium nucleatum
VAKNNGTL

SEQ ID NO: 4528 - protein, 11 aa, Fusobacterium nucleatum
EGASLFYATLK

SEQ ID NO: 4529 - protein, 10 aa, Fusobacterium nucleatum
SIRPYGALKV

SEQ ID NO: 4530 - protein, 9 aa, Fusobacterium nucleatum
VKNGKPTFL

SEQ ID NO: 4531 - protein, 10 aa, Fusobacterium nucleatum
DIDPMTGKVY

SEQ ID NO: 4532 - protein, 10 aa, Fusobacterium nucleatum
SFENKANINI

SEQ ID NO: 4533 - protein, 11 aa, Fusobacterium nucleatum
VSQAYIDELQK

SEQ ID NO: 4534 - protein, 9 aa, Fusobacterium nucleatum
QSYIKGIKV

SEQ ID NO: 4535 - protein, 8 aa, Fusobacterium nucleatum
TSNSKISL

SEQ ID NO: 4536 - protein, 9 aa, Fusobacterium nucleatum
HAKSKYYTY

SEQ ID NO: 4537 - protein, 9 aa, Fusobacterium nucleatum
TAVGKENVL

SEQ ID NO: 4538 - protein, 10 aa, Fusobacterium nucleatum
IEGNSTLTGV

SEQ ID NO: 4539 - protein, 10 aa, Fusobacterium nucleatum
EAVSSAGVYA

SEQ ID NO: 4540 - protein, 10 aa, Fusobacterium nucleatum
EVAYENELGR

SEQ ID NO: 4541 - protein, 11 aa, Fusobacterium nucleatum
IDILAENGVGI

SEQ ID NO: 4542 - protein, 10 aa, Fusobacterium nucleatum
KANIINNRTI

SEQ ID NO: 4543 - protein, 9 aa, Fusobacterium nucleatum
VTNSPLLSK

SEQ ID NO: 4544 - protein, 11 aa, Fusobacterium nucleatum
AQAEAGKKANV

SEQ ID NO: 4545 - protein, 8 aa, Fusobacterium nucleatum
RMVLTHVI

SEQ ID NO: 4546 - protein, 10 aa, Fusobacterium nucleatum
SSWQFGMNYF

SEQ ID NO: 4547 - protein, 9 aa, Fusobacterium nucleatum
FTNTGNIYV

SEQ ID NO: 4548 - protein, 10 aa, Fusobacterium nucleatum
ATDGVVGISL

SEQ ID NO: 4549 - protein, 10 aa, Fusobacterium nucleatum
KTSAGMLGDK

SEQ ID NO: 4550 - protein, 11 aa, Fusobacterium nucleatum
NKDNIGILANK

SEQ ID NO: 4551 - protein, 9 aa, Fusobacterium nucleatum
IFGKNSSTL

SEQ ID NO: 4552 - protein, 9 aa, Fusobacterium nucleatum
ITSESGATK

SEQ ID NO: 4553 - protein, 10 aa, Fusobacterium nucleatum
NKNIITLNGK

SEQ ID NO: 4554 - protein, 10 aa, Fusobacterium nucleatum
NMEIGDGTTA

SEQ ID NO: 4555 - protein, 10 aa, Fusobacterium nucleatum
ITTTDSYAGR

SEQ ID NO: 4556 - protein, 9 aa, Fusobacterium nucleatum
NANNTKSVV

SEQ ID NO: 4557 - protein, 9 aa, Fusobacterium nucleatum
TRKYEGAPA

SEQ ID NO: 4558 - DNA, 36 bp, synthetic construct
  source 1..36: mol_type = other DNA
gactacaaagacgatgacgacaagggcggaggctct

SEQ ID NO: 4559 - protein, 12 aa, synthetic construct
DYKDDDDKGGGS

SEQ ID NO: 4560 - protein, 3440 aa, Fusobacterium nucleatum
EVNLENSQVATREELKTSVGNVQTKLNILRNENKEKIKNLRLELIQLMEQGDQVVKSPWSSWQFGMNYFYENWRSTYKGSGDKSEKYVFNGIYTRGNWKVRNAMDMAENQRVGGRPLTPGNDSLNSWKNASNSSGGGVTIDKDTSIGSSTNGNKSWGLVDLRDLREPTNEVEILAHISPKEVTKQVISLNITEPTVQTLEAPDVNPQVNEPLPAPVIELPEVETVTINPLSINAPSAPTAPSAPTINIAITAPSAPVPPTINVVPASPSTPSAPTINIGIQPPSITPLSITTPDSVDAPNVVSPQIKPVDFTVDPGGDSNVYSSEKHNSHQGWKATWDKTINVTELTNRNYVSLTRDVVDSTIPDDQVINVTKPNNRAMVVDEVRKNGIKVDFKGTINLQRSQNVGIDLQGTHQGSISTPLIANIYNSGKIIGNAKYGSTANKEQIAFGFNNADGSNNTTMTNMVNKGEITLNAPSSAGIQLKPEDPHDWQPGAPNYWNAAPLQIGNKTPNKIKGRVLMKADNQKDINLNGSGSFGMVTVFNEGVPKRLFAPSYVANYENLRSERTYDGERVLPGGEIGRSALSDSKYTSGVYNTGNININGDSSIGVGLLQEIQEVKLAGNINIGTKAVAQETDISNLPNAGSKTYDKNKVEEAVGVFAGVPTMPVKPGEKDTLINSSGARNTATSLVGTETVEINGNISLGEHATQSIGALVGDTEIDLNKGQLTENGVNKGSNVDRKLKRSGDITAKSNSVINVGGKKNYGFVVSNSAHSSKFGTTVDSLEYNVDKTHHGKGINEGIINIIGDESVGFAMIKGGNSKSSGTISVKDNAENSIGFYGKEDSFTNSGTIEVTSAKKKNKAVVLDGTNASNKINFTNTGNIYVNTSDNNNTNLDGNGNIGIYAQGNYKVEHNSGIVKAGKDVIAFYVKDSTGEVNINAPIELANSSKGTTIGIYSDGNAKVKFGTGSKLKIGEKAVGLYSADPTKFNNTFKIESGKTLDVELGKNSTFGLLNGNNTVTNSPLLSKYLNNNTSDKINIVSFGEGASLFYATSKAKAILDEDYKVTNGDAISTAVLVANNGANVEIASGKKLETNTNAGLIAINGTVGFTSVAKNNGTLISTRIDKGIGIYTSAANGENSGTITMQNKNAVGILGSKDSNLKNTGKIELEAVSSAGVYAEDSNMINSGTTSEIIVNKETSVGIYAKETSISSVSKNVKNEGKIEIKADGDGKSAGIYSKKEGGAKLTIENTGNIEVAQKASAGIYAKNESTQANTQSEVTNSGLVKMSAENSIGIMGEKSKITNTGTGTKGIEIVEKKSAGILVTNESAVINSGRISLSNSSISASSDGLVGISVDGSSTGENDASGEIKVDAAYSTGMLSSGGGITNAGKIALEKKESVGMYATNANVTNSGATPKGIFIKDEKSVGIYSKINSSSIANKTVTNSGTIDIAGTSKTGSAGIYSIIESGATKKLSVVNNGNITINQKKSVGIYAKNESSHANTESDVTNSGKIEVKNEGSAGVLAEKYKVTNTGSGTNGIIVSAKKSAGIIGKLGSEIINSGIIKTEIATPTVATDGVVGISLNNSKATNTSGGVITLDTDYSTGMYGEANSQLTNEGNITGTNKEYIVGMAGDSSTVTNKNIITLNGKKATGIFGKNSSTLLNETTGKITTKEEESVGMYSSSSLKATNKGTIITEKKTSAGMLGDKANIENDSSITTKEEMSAGMYVKNGTSKATNKGTVTTEKKTSAGILAEIDEANGGTVSGLNETTGTITVSEETSAGMLGKVKSAVTASTAKLSLTNKKDININTKNSAGIMVVNESTAVGKENVLAENTGIINLTSSSATNEKNIGILANKATGINTGNINVNSKESIGMLGQNASSITNNKTITLSGEKGIGMLSKDTSSIADNNDTINVNGKESLGMLGEDSGTVKNNKTISVTAEKGVGIFVRDNGVGKGSGTGENTSTGTITLENKEAVGIFAKNNGTSDSAKNSGTINLGKADGSTIKESLIGMFAQAEAGKKANVKNTKDINVNTKKSVGIYAKNDASNITDVDLENTGDININSKESAGVYAPKANISKVGTITLKNSIDSNGSSAVYVSKGGKVANTAGAKINLGTVNQNRVAYYVNGKDSALAGADIGKITGYGVGVYLQGTSGDKATLDKNTSKLDYTLQGTGNGIIGLLLKGETDIQSYTKGIKVGNTVAATSPSDKAKYAIGIYADAQGTAGTPYNITTPITAGKSGVGIFADKDSNINYTGNMEIGDGTTAGTGIFITKKIGATGGKVTLGTNTIKLKGTKGVVAIASEGTTFNGGNATIELVGSNIQGVGVYAKKGSTVNIDHWTFNNNGNSAEEVRSEEGRVYINANKNLKPKMVLTHVINGETSIATGKTVTSVNDGSITAKENIGLMAEGIKNHSMTWQEGNFEAVNHGIIDFSAAEKSTAMFINSARAKNDGTIKVGKNSIGIYGFYNKDTRKYDGASTNPDPNKLELETTSNSKMSLGDASTGMYLTNAEKIENKGGQITSESGATKNVGIYAVNGQDTKVSANNKILNMTTATNINLGNGSVGLYSKGQSNTVRNTVTNTGDITVGDKITGSPSVAMYAENTNLTTNSKITVGKDGIAFYGKNSDITAKGSANFSNKGVLAYLENSKFVSHLGNLGSTQNTMLYLKNSIAQLDGAGTKVDMDVADGYTGAYIEGNSTLTGVKTIKLGQDSTGLFLKDANFVSNAESITGTKDKARGILATNSNLTNNSKIFLSGAESIGIYSNANNTKSVVNNGELTIAGKKTLGVFLKGSQSFENKANINIADSANSLEPTIGIYTAEGSSNIKHTSGTIDVGQKSIGIYSTTNSNVEMNGGKIHVKDQGVGIYKQNGKATIKGELDIDTHIATTKDSEPTGVYAVNGTEINDQASKISIGAKSYGFILNNTDPNKTNIYTNTDAGTVSLGNDSVFLYSNGKANIINNRTINANGASHLIAFYIKNGGNFTNNGTIDFSTGKGNIGIYAPGGKATNKGRVYVGKTDDIDPMTGKVYSDVSKIVYGIGMAADNGGYIKNDGEIRIYNNKSIGMYGKGIGTTVENTGKIYLDGSRATATDKIQSMTGVYVDDGAKFINRGEIRTTDSYAGRDGKVNENVTGLVGVAVMNGSTLENHGKILIDADNSYGVIIRGKRDSKGNVERYAVIKNYGEIKVRGKGTWGISWKDVSQAYIDELQKQINDKISSDPEGQALRAATGTNKDYEGVTITVKNGKPTFLRNGVPISDSEVEQIGKLIGKESNLGLSDIGFYVDTLGRTKPIDIDGATPPINSQLIIGTEYSEKTNKKQWFVKGDVIKPFLDQIQGRNFKLTSIAGSLTWIATPVLDNYGQITGVAMAKLPYTSFVNKTDNAWNFADGLEQRYDMNALDSVEKRIFNKLNSIGKNEQTLLTQAYDEMMGHQYANVQQR

SEQ ID NO: 4561 - protein, 1033 aa, Fusobacterium nucleatum
EVNLENSQVATREELKTSVGNVQTKLNILRNENKEKIKNLRLELIQLMEQGDQVVKSPWSSWQFGMNYFYENWRSTYKGSGDKSEKYVFNGIYTRGNWKVRNAMDMAENQRVGGRPLTPGNDSLNSWKNASNSSGGGVTIDKDTSIGSSTNGNKSWGLVDLRDLREPTNEVEILAHISPKEVTKQVISLNITEPTVQTLEAPDVNPQVNEPLPAPVIELPEVETVTINPLSINAPSAPTAPSAPTINIAITAPSAPVPPTINVVPASPSTPSAPTINIGIQPPSITPLSITTPDSVDAPNVVSPQIKPVDFTVDPGGDSNVYSSEKHNSHQGWKATWDKTINVTELTNRNYVSLTRDVVDSTIPDDQVINVTKPNNRAMVVDEVRKNGIKVDFKGTINLQRSQNVGIDLQGTHQGSISTPLIANIYNSGKIIGNAKYGSTANKEQIAFGFNNADGSNNTTMTNMVNKGEITLNAPSSAGIQLKPEDPHDWQPGAPNYWNAAPLQIGNKTPNKIKGRVLMKADNQKDINLNGSGSFGMVTVFNEGVPKRLFAPSYVANYENLRSERTYDGERVLPGGEIGRSALSDSKYTSGVYNTGNININGDSSIGVGLLQEIQEVKLAGNINIGTKAVAQETDISNLPNAGSKTYDKNKVEEAVGVFAGVPTMPVKPGEKDTLINSSGARNTATSLVGTETVEINGNISLGEHATQSIGALVGDTEIDLNKGQLTENGVNKGSNVDRKLKRSGDITAKSNSVINVGGKKNYGFVVSNSAHSSKFGTTVDSLEYNVDKTHHGKGINEGIINIIGDESVGFAMIKGGNSKSSGTISVKDNAENSIGFYGKEDSFTNSGTIEVTSAKKKNKAVVLDGTNASNKINFTNTGNIYVNTSDNNNTNLDGNGNIGIYAQGNYKVEHNSGIVKAGKDVIAFYVKDSTGEVNINAPIELANSSKGTTIGIYSDGNAKVKFGTGSKLKIGEKAVGLYSADPTKFNNTFKIESGKTLDVELGKNSTFGLLNGNNTVTNSPLLSKYLNNNTSD

SEQ ID NO: 4562 - protein, 1040 aa, Fusobacterium nucleatum
MHHHHHHEVNLENSQVATREELKTSVGNVQTKLNILRNENKEKIKNLRLELIQLMEQGDQVVKSPWSSWQFGMNYFYENWRSTYKGSGDKSEKYVFNGIYTRGNWKVRNAMDMAENQRVGGRPLTPGNDSLNSWKNASNSSGGGVTIDKDTSIGSSTNGNKSWGLVDLRDLREPTNEVEILAHISPKEVTKQVISLNITEPTVQTLEAPDVNPQVNEPLPAPVIELPEVETVTINPLSINAPSAPTAPSAPTINIAITAPSAPVPPTINVVPASPSTPSAPTINIGIQPPSITPLSITTPDSVDAPNVVSPQIKPVDFTVDPGGDSNVYSSEKHNSHQGWKATWDKTINVTELTNRNYVSLTRDVVDSTIPDDQVINVTKPNNRAMVVDEVRKNGIKVDFKGTINLQRSQNVGIDLQGTHQGSISTPLIANIYNSGKIIGNAKYGSTANKEQIAFGFNNADGSNNTTMTNMVNKGEITLNAPSSAGIQLKPEDPHDWQPGAPNYWNAAPLQIGNKTPNKIKGRVLMKADNQKDINLNGSGSFGMVTVFNEGVPKRLFAPSYVANYENLRSERTYDGERVLPGGEIGRSALSDSKYTSGVYNTGNININGDSSIGVGLLQEIQEVKLAGNINIGTKAVAQETDISNLPNAGSKTYDKNKVEEAVGVFAGVPTMPVKPGEKDTLINSSGARNTATSLVGTETVEINGNISLGEHATQSIGALVGDTEIDLNKGQLTENGVNKGSNVDRKLKRSGDITAKSNSVINVGGKKNYGFVVSNSAHSSKFGTTVDSLEYNVDKTHHGKGINEGIINIIGDESVGFAMIKGGNSKSSGTISVKDNAENSIGFYGKEDSFTNSGTIEVTSAKKKNKAVVLDGTNASNKINFTNTGNIYVNTSDNNNTNLDGNGNIGIYAQGNYKVEHNSGIVKAGKDVIAFYVKDSTGEVNINAPIELANSSKGTTIGIYSDGNAKVKFGTGSKLKIGEKAVGLYSADPTKFNNTFKIESGKTLDVELGKNSTFGLLNGNNTVTNSPLLSKYLNNNTSD
